(19) United States
(12) Patent Application Publication
(10) Pub. No.: US 2005/0003444 A1
(43) Pub. Date: Jan. 6, 2005

(54) Novel human polynucleotides and the polypeptides encoded thereby

(75) Inventors: Michael Nehls, The Woodlands, TX (US); Brian Zambrowicz, The Woodlands, TX (US); Arthur T. Sands, The Woodlands, TX (US)

Correspondence Address: JONES DAY, 222 EAST 41ST ST, NEW YORK, NY, 10017, US

(73) Assignee: Lexicon Genetics Incorporated

(21) Appl. No.: 10/914,037

(22) Filed: Aug. 6, 2004

Related U.S. Application Data
(63) Continuation of application No. 09/428,674, filed on Oct. 27, 1999.
(60) Provisional application No. 60/106,442, filed on Oct. 30, 1998.

(51) Int. Cl. C12Q 1/68; C07H 21/04; C12N 9/00

(52) U.S. Cl. 435/6; 435/69.1; 435/183; 435/320.1; 435/325; 530/350; 536/23.2

(57) ABSTRACT

Novel human polynucleotides are disclosed that correspond to human gene trapped sequences, or GTSs. The disclosed GTSs are useful for gene discovery and as markers for, inter alia, gene expression analysis, forensic analysis, and determining the genetic basis of human disease.

[0001] This application claims priority to U.S. Provisional Application No. 60/106,442, filed Oct. 30, 1998, which is also incorporated herein by reference for any purpose.

### 1. FIELD OF THE INVENTION

[0002] The present invention is in the field of molecular genetics. The application discloses novel nucleic acid sequences that partially define the scope of human exons that can be trapped and identified by the disclosed vectors/methods, and which are useful, inter alia, for identifying the organization of the coding regions and of the human genome.

### 2. BACKGROUND OF THE INVENTION

[0003] The Human Genome Project and privately financed ventures are currently sequencing the human genome, and the substantial completion of this milestone is expected before the year 2003. The hope is that, at the conclusion of the sequencing phase, a comprehensive representation of the human genome will be available for biomedical analysis. However, the data resulting from such efforts will largely comprise human genomic sequence of which only a fraction actually encodes expressed sequence information. Although sophisticated computer-assisted exon identification programs can be applied to such genomic sequence data, the computer predictions require verification by laboratory analysis to actually identify the coding regions of the genome. Consequently, the availability of cDNA information will significantly contribute to the value of the human genomic sequence since cDNA sequence provides a direct indication of the presence of transcribed sequences as well as the location of splice junctions. Thus, the sequencing of cDNA libraries to obtain expressed sequence tags (or ESTs) that identify exons expressed within a given tissue, cell, or cell line is currently in progress. As a consequence of these efforts, a large number of EST sequences are presently compiled in public and privately held databases. However, the present EST paradigm is inherently limited by the levels and extent of mRNA production within a given cell. A related problem is the lack of cDNA sources from specific tissue and developmental expression profiles. In addition, some genes are typically only active under certain physiological conditions or are generally expressed at levels below or near the threshold necessary for cDNA cloning and detection and are therefore not effectively represented in current cDNA libraries.

[0004] Researchers have partially addressed these issues by using phage vectors to clone genomic sequences such that internal exons are trapped (Nehls, et al., 1994, Current Biology, 4(1):983-989, and Nehls, et al., 1994, Oncogene, 9:2169-2175). However, such libraries require the random cloning of genomic DNA into a suitable cloning vector in vitro, followed by reintroduction of the cloned DNA in vivo in order to express and splice the cloned genes prior to producing the cDNA library. Additionally, such methods can only “trap” the internal exons of genes. Consequently, genes containing a single exon or a single intron are typically not trapped by traditional methods of exon trapping.

### 3. SUMMARY OF THE INVENTION

[0005] The subject invention provides numerous isolated and purified novel human cDNAs produced using gene trap technology. The novel human gene trapped sequences (GTSs) of the subject invention are disclosed as SEQ ID NOS:9-1008 in the appended Sequence Listing.

[0006] The subject invention further contemplates the use of one or more of the subject GTSs, or portions thereof, to isolate cDNAs, genomic clones, or full-length genes/polynucleotides, or homologs, heterologs, paralogs, or orthologs thereof, that are capable of hybridizing to one or more of the disclosed GTSs or their complementary sequences under stringent conditions.

[0007] The subject invention additionally contemplates methods of analyzing biopolymer (e.g., oligonucleotides, polynucleotides, oligopeptides, peptides, polypeptides, proteins, etc.) sequence information comprising the steps of loading a first biopolymer sequence into or onto an electronic data storage medium (e.g., digital or analogue versions of electronic, magnetic, or optical memory, and the like) and comparing said first sequence to at least a portion of one of the polynucleotide sequences, or amino acid sequence encoded thereby, that is first disclosed in, or otherwise unique to, SEQ ID NOS:9-1008. Typically, the polynucleotide sequences, or amino acid sequences encoded thereby, will also be present on, or loaded into or onto a form of electronic data storage medium, or transferred therefrom, concurrent with or prior to comparison with the first polynucleotide.

[0008] Another embodiment of the invention is the use of a oligonucleotide or polynucleotide sequence first disclosed in at least a portion of at least one of the GTS sequences of SEQ ID NOS:9-1008 as a hybridization probe. Of particular interest is the use of such sequences in conjunction with a solid support matrix/substrate (resins, beads, membranes, plastics, polymers, metal or metallized substrates, crystalline or polycrystalline substrates, etc.). Of particular note are spatially addressable arrays (i.e., gene chips, microtiter plates, etc.) of polynucleotides wherein at least one of the polynucleotides on the spatially addressable array comprises an oligonucleotide or polynucleotide sequence first disclosed in at least one of the GTS sequences of SEQ ID NOS:9-1008.

[0009] Similarly, one or more oligonucleotide probes based on, or otherwise incorporating, sequences first disclosed in any one of SEQ ID NOS:9-1008, can be used in methods of obtaining novel gene sequence via the polymerase chain reaction or by cycle sequencing. Similar oligonucleotide hybridization probes can also comprise sequence that is complementary to a portion of a sequence that is first disclosed in, or preferably unique to, at least one of the GTS polynucleotides in the sequence listing. The oligonucleotide probes will generally comprise between about 8 nucleotides and about 80 nucleotides, preferably between about 15 and about 40 nucleotides, and more preferably between about 20 and about 35 nucleotides.

[0010] Moreover, an oligonucleotide or polynucleotide sequence first disclosed in at least one of the GTS sequences of SEQ ID NOS:9-1008 can be incorporated into a phage display system that can be used to screen for proteins, or other ligands, that are capable of binding an amino acid sequence encoded by an oligonucleotide or polynucleotide sequence first disclosed in at least one of the GTS sequences of SEQ ID NOS:9-1008.

[0011] An additional embodiment of the present invention is a library comprising individually isolated linear DNA molecules corresponding to at least a portion of the described human GTSs which are useful for synthesizing physically contiguous sequences of overlapping GTSs by, for example, the polymerase chain reaction (PCR).

[0012] The subject invention also provides for an antisense molecule which comprises at least a portion of sequence that is first disclosed in, or preferably unique to, at least one of the GTS polynucleotides.

[0013] The subject invention also contemplates a purified polypeptide in which at least a portion of the polypeptide is encoded by, and thus first disclosed by, at least a portion of a GTS of the present invention. The invention also relates to naturally occurring polynucleotides comprising the disclosed GTSs that are expressed by promoter elements other than the promoter elements that normally express the GTSs in human cells (i.e., gene activated GTSs). Such promoter elements can be directly incorporated into the cellular genome or recombinantly engineered upstream from at least a portion of a GTS (preferably at least about 50, more preferably at least about 75, and most preferably at least about 100 to 130 base in length) of the present invention, or a complement thereof. A particularly preferred embodiment includes recombinantly engineered expression vectors that similarly have or incorporate at least a, preferably unique, portion of the disclosed GTSs or complement thereof.

### 4. DESCRIPTION OF THE SEQUENCE LISTING AND FIGURES

[0014] The Sequence Listing is a compilation of nucleotide sequences obtained by sequencing a human gene trap library that at least partially identifies the genes in the target cell genome that can be trapped by the described gene trap vectors (i.e., the repertoire of genes that are active or have not been inactivated).

[0015] FIGS. 1A-1D. FIG. 1A illustrates a retroviral vector that can be used to practice the described invention. FIG. 1B shows a schematic of how a typical cellular genomic locus is effected by the integration of the retroviral construct into intronic sequences of the cellular gene. FIG. 1C shows the chimeric transcripts produced by the gene trap event as well as the locations of the binding sites for PCR primers. FIG. 1D shows how the PCR amplified cDNAs are directionally cloned into a suitable GTS vector.

### 5. DETAILED DESCRIPTION OF THE INVENTION

[0016] The present invention is directed to novel human polynucleotide sequences obtained from cDNA libraries generated by the normalized expression of genomic exons using gene trap technology. In particular, the disclosed novel polynucleotides were generated using a modified reverse-orientation retroviral gene trap vector that was nonspecifically integrated into the target cell genome, although other polynucleotide (DNA or RNA) gene trap vectors could have been introduced to the target cells by, for example, transfection, electroporation, or retrotransposition. Preferred retroviral vectors that can be used to practice the present invention (as well as methods and recombinant tools for making and using the described GTSs) are disclosed in, inter alia, U.S. application Ser. No. 09/276,533, filed Mar. 25, 1999 which is herein incorporated by reference in its entirety.

[0017] After integration, the exogenous promoter of the sequence acquisition, or 3′ gene trap, component of the vector was used to express and splice a chimeric mRNA that was subsequently reverse transcribed, amplified, and subject to DNA sequence analysis. Unlike conventional cDNA libraries, the presently disclosed libraries are largely unaffected by the bias inherent in cDNA libraries that rely solely on endogenous mRNA expression. Additionally, by integrating a vector into the target cell genes, a chimeric mRNA is produced that allows for the specific expansion and isolation of cDNAs corresponding to the chimeric mRNAs using vector specific primers.

[0018] As used herein the term “gene trapped sequence”, or “GTS”, refers to nucleotide sequences that correspond to naturally occurring endogenously encoded human exons that have been expressed as part of a chimeric “gene trapped” mRNA. Typically, the chimeric mRNA incorporates at least a portion of sequence that has been engineered into the sequence acquisition exon of a gene trap vector which, inter alia, facilitates cDNA production by reverse transcriptase and amplification of the cDNA by PCR to produce an isolated linear DNA molecule. The disclosed GTSs do not include vector encoded sequences.

[0019] The term “GTS” not only refers to polynucleotides that are exactly complementary to naturally occurring human mRNA, but also refers to “GTS derivatives”. The term “GTS derivative” also refers to heterologs, paralogs, orthologs, and allelic variants of the specific GTSs described herein. In addition, a GTS may include the complete coding region for a naturally occurring peptide or polypeptide. A GTS may also include a complete open reading frame.

[0020] The term “GTS peptide” as used herein includes oligopeptides or polypeptides sharing biological activity and/or immunogenicity (or immunological cross-reactivity) with an amino acid sequence encoded by at least one of the disclosed GTSs or complement thereof. The terms “biological activity” (or “biological characteristics”) of a polypeptide refers to the structural or biochemical function of the polypeptide in the normal biological processes of the organism in which the polypeptide naturally occurs. Examples of such characteristics include protein structure and/or conformation, which can be determined biochemically by reaction with appropriate ligands or receptors or by suitable biological assays.

[0021] A GTS peptide may also correspond to a full-length naturally occurring peptide or polypeptide. GTS peptides can have amino acid sequences that directly correspond to naturally occurring polypeptides or amino acid sequences or can comprise minor variations. Such variations can include amino acid substitutions that are the result of the replacement of one amino acid with another amino acid having a similar structural and/or chemical properties, such as the substitution of a leucine with an isoleucine or valine, an aspartate with a glutamate, or a threonine with a serine, i.e., conservative amino acid replacements. Additional variations include minor amino acid deletions and/or insertions, typically in the range of about 1 to 6 amino acids, and can also include one or more amino acid substitutions. Guidance in determining which GTS peptide amino acid residues can be replaced or deleted without abolishing the biological activity of interest may be determined empirically, or by using computer amino acid sequence databases to identify polypeptides that are homologous to a given GTS peptide and trying to avoid amino acid substitutions in conserved regions of homology.

[0022] “Homology” refers to the similarity or the degree of similarity between a reference, or known polynucleotide and/or polypeptide and a test nucleotide sequence and/or its orresponding amino acid sequence. As used herein, “homology” is defined by sequence imilarity between a reference sequence and at least a portion of the newly sequenced nucleotide. Typically, a corresponding amino acid sequence similarity should exist between the peptides encoded by such homologous sequences.

[0023] To determine whether proteins are homologous, the GTS sequence is translated into the corresponding amino acid sequence. The amino acid sequence is then compared with reference polypeptide sequences. A short string of matching amino acid sequence can constitute good evidence of homology (for example, repeating Gly-Pro-X sequence, or the presence of an RGD motif). However, typically a larger number of similar amino acids is required to label two sequences homologous. Generally, the match needs to be at least about 7 or 8 amino acids, among which perhaps one mismatch is allowed. These criteria allow good sensitivity in finding all relevant sequences while providing a threshold amount of selectivity.

[0024] After peptide homology has been found, the respective nucleotide sequences are compared. An alignment of the reference and new sequences should show at least about 60%, and preferably at least about 65%, agreement over the minimum of 21 nucleotides which correspond to the 6 matching amino acids. Generally, a low percentage of agreement is acceptable if the differences are in the “wobble” position (or third nucleotide of the triplet coding for an amino acid).

[0025] As used herein, a “mutated” polypeptide has an altered primary structure typically resulting from corresponding mutations in the nucleotide sequence encoding the protein or polypeptide. As such, the term “mutated” polypeptides can include allelic variants. Mutational changes in the primary structure of a polypeptide result from deletions, additions or substitutions. A “deletion” is defined as a change in a polypeptide sequence in which one or more internal amino acid residues are absent. An “addition” is defined as a change in a polypeptide sequence which has resulted in one or more additional internal amino acid residues as compared to the wild type. A “substitution” results from the replacement of one or more amino acid residues by other residues. A polypeptide “fragment” is a polypeptide consisting of a primary amino acid sequence which is identical to a portion of the primary sequence of the polypeptide to which the polypeptide is related.

[0026] A host cell “expresses” a gene or DNA when the gene or DNA is transcribed into RNA that may optionally be translated to produce a polypeptide.

[0027] The subject invention also includes GTSs which are incorporated into expression vectors and transformed into host cells which subsequently express the polynucleotides and/or polypeptides encoded by the GTSs.

[0028] The subject invention also includes antibodies capable of specifically binding to GTS peptides, as well as methods of detecting a GTS peptides or the corresponding protein by combining a sample for analysis with an antibody capable of specifically binding to a GTS peptide and detecting the formation of antibody complexes present in the sample.

[0029] The subject invention also includes a method of isolating a GTS peptide, or its corresponding protein comprising the step of separating the GTS peptide, or its corresponding protein, from a solution utilizing an antibody capable of specifically binding to the GTS peptide or its corresponding protein.

[0030] The subject invention also provides for markers for use in detecting diseases, biological events, cell types and tissues which comprise at least a portion of a GTS sequence.

[0031] Further, the subject invention provides polynucleotide markers useful for physical and genetic mapping of the human, and/or certain model organism, genome(s). In particular, the nucleotide sequences in the Sequence Listing provide sequence tagged sites (STS), that will be useful in completing an STS-based physical map of the human genome, a goal of the human genome project (Collins, F. and Galas, D. (1993) Science 262:43-46). Additionally, some of these sequences will identify new genes. These new genes will be useful in completing physical and genetic maps of all the genes in the human genome, another goal of the human genome project.

[0032] The exons contained in the disclosed GTSs contain open reading frames (present in one of the three reading frames in either orientation of the sequence). Typically, the gene trap strategy employed to generate the GTS sequences allows for the directional cloning and identification of the sense strand. However, it is possible that occasional sequencing errors or random reverse transcription, or PCR aberrations will mask the presence of the appropriate open reading frame. In such cases of sequencing error, it is possible to determine the corresponding GTS sequence by expressing the GTS in an appropriate expression system and determining the amino acid sequence by standard peptide mapping and sequencing techniques (Current Protocols in Molecular Biology, John Wiley & Sons, Vol. 2, Sec 16, 1989). Additionally, the actual reading frame and amino acid sequence of a given nucleotide sequence may be determined by in vitro synthesis of a portion of an oligopeptide comprising a possible amino acid scquence and preparing antibodies to the oligopeptide. If the antibodies react with cells from which the GTS of interest was derived, the reading frame is likely correct. Alternatively, codon usage analysis can be used to track and correct reading frame shifts in gene sequence data.

[0033] The correct amino acid sequence of a GTS protein is largely a function of the DNA sequence and the correct amino acid sequence can be readily determined using routine techniques. For example, by providing independent three fold sequencing coverage of the GTS library, random sequencing/RT/PCR errors can be identified and corrected by selecting the sequence represented by the majority of gene trap sequences covering a given nucleotide.

[0034] The nucleotide sequences of the Sequence Listing may contain some sequencing errors and several of the nucleotide sequences of the Sequence Listing may contain nucleotides that have not been precisely identified, typically designated by an N, rather than A, T, C, or G. Since each of the nucleotide sequences presented in the Sequence Listing is believed to uniquely identify a novel GTS, any sequencing errors or N's in the nucleotide sequences of the Sequence Listing do not present a problem in practicing the subject invention. Several methods employing standard recombinant methodology, for example, as described in Molecular Cloning: Laboratory Manual 2nd ed., Sambrook et al. (1989), Cold Spring Harbor Laboratory, Cold Spring Harbor, N.Y. (or periodic updates thereof), may be used to correct errors and complete the missing sequence information. For example, a nucleotide and/or oligonucleotide corresponding to a portion of a nucleotide sequence of GTS of interest, can be chemically or biochemically synthesized in vitro, and used as a hybridization probe to screen a cDNA library in order to identify and obtain library isolates comprising recombinant DNA sequences containing the GTS cDNA sequence of interest. The library isolate may then be independently subjected to nucleotide sequencing using one or more standard sequencing procedures so as to obtain a complete and accurate nucleotide sequence.

[0035] For the purposes of this disclosure, the term “isolated and purified polynucleotide” comprises a polynucleotide purified from a natural cell or tissue as well as polynucleotides which are complementary to the polynucleotides isolated from the natural cell or tissue. One example of an isolated or purified polynucleotide, or a substantially isolated preparation thereof, is a preparation where the polynucleotide of interest represents at least about 80 percent, preferably at least about 85 percent, and more preferably at least about 90 to 95 percent or more of the net product(s) that can be visualized on a DNA agarose gel stained with ethidium bromide.

[0036] The described GTSs were obtained from isolates of a cDNA library. Clones isolated from cDNA libraries generated by 3′ gene trapping typically contain only a portion of the mature RNA transcript that has been spliced to a vector encoded sequence acquisition exon, and therefore such clones may only encode a portion of the polypeptide of interest (however, it should be appreciated that a number of the disclosed GTSs may encode full-length ORFs). To obtain the remainder of the sequence, the GTSs can be used as hybridization probes to re-screen the same or a different cDNA library, and additional clones isolated by the re-screening can be purified and characterized using standard methods (Benton and Davis, 1977, Science, 196:180-183). Once sufficiently purified, the size of the DNA insert can be approximated by agarose gel electrophoresis and the larger clones can be analyzed to determine the exact number of bases by DNA sequencing. Frequently, the use of a library different from the one which contained the original clone is useful for this purpose, and particularly a library that has been prepared with extra care to extend cDNA synthesis to full-length, or a library that has been intentionally primed with random primers in order to “jump over” particularly difficult regions of the transcript sequence.

[0037] Missing upstream DNA sequence can also be obtained by “primer extension” of the cDNA isolate, a practice common in the art (Sambrook et al. (1989), Molecular Cloning: Laboratory Manual 2nd ed. pg 7.79-7.83, Cold Spring Harbor Laboratory, Cold Spring Harbor, N.Y.), whereby a sequence-specific oligonucleotide is used to prime reverse-transcription near the 5′-end of the cDNA clone and the resulting product is either cloned into a bacterial vector or is analyzed directly by DNA sequencing. Finally, newer methods to extend clones in either direction employ oligonucleotide-directed thermocyclic DNA amplification of the missing sequences, wherein a combination of a cDNA-specific primer and a degenerate, vector-specific, or oligo-dT-binding second oligonucleotide can be used to prime strand synthesis. In any of the above methods or other methods of detecting additional cDNA sequence, two or more resulting clones containing the partial cDNA sequence can be recombined to form a single full-length cDNA by standard cloning methods. The resulting full-length cDNA may subsequently be transferred into any of a number of appropriate expression vectors.

[0038] In many instances, the sequencing of clones resulting from independent nonspecific gene trap events will result in a natural redundancy of sequencing more than one cDNA from a particular gene. As discussed above, this feature is a built in form of error detection and correction. These independent gene trap events can also be combined using the various overlapping regions of sequence into an entire contiguous sequence (“contig”) containing the complete nucleotide sequence of the full length cDNA. Similar methodology can be used to combine one or more GTSs with one or more publicly available, or proprietary, ESTs to synthesize, electronically or chemically, a contiguous sequence.

[0039] The ABI Assembler application, part of the INHERITS DNA analysis system (Applied Biosystems, Inc., Foster City, Calif.), creates and manages sequence assembly projects by assembling data from selected sequence fragments into a larger sequence. The Assembler combines two advanced computer technologies which maximize the ability to assemble sequenced DNA fragments into Assemblages, a special grouping of data where the relationships between sequences are shown by graphic overlap, alignment and statistical views. The process is based on the Meyers-Kececioglu model of fragment assembly (INHERITS™ Assembler User's Manual, Applied Biosystems, Inc., Foster City, Calif.), and uses graph theory as the foundation of a very rigorous multiple sequence alignment program for assembling DNA sequence fragments. Additional methods of using GTSs and obtaining full length versions thereof are discussed in U.S. Pat. No. 5,817,479, herein incorporated by reference.

[0040] It will be appreciated by those skilled in the art that as a result of the degeneracy of the genetic code (see, for example, Table 4-1 at page 109 of “Molecular Cell Biology”, 1986, J. Darnell et al. eds., Scientific American Books, New York, N.Y., herein incorporated by reference) a multitude of GTS nucleotide sequences, some bearing minimal nucleotide sequence homology to the nucleotide sequence of genes naturally encoding GTS peptides, can be produced. The invention has specifically contemplated each and every possible variation of nucleotide sequence that could be made by selecting combinations based on possible codon choices. These combinations are made in accordance with the standard triplet genetic code as applied to the nucleotide sequence of naturally occurring human GTS nucleotide sequences and all such variations are to be considered as being specifically disclosed. Once the triplet codons are “translated” (which can be done electronically) into their amino acid counterparts, the amino acid sequences encoded by the GTS ORFs effectively represent a generic representation of the various nucleotide sequences that can encode the amino acid sequence (i.e., each amino acid is generic for the various nucleotide codons that correspond to that amino acid).

[0041] The presently described novel human GTSs provide unique tools for diagnostic gene expression analysis, for cross species hybridization analysis, for genetic manipulations using a variety of techniques, like, for example, antisense inhibition, gene targeting, the identification or generation of full-length cDNA, mapping exons in the human genome, identifying exon splice junctions, gene therapy, gene delivery, chromosome mapping, etc. Furthermore, the expression-based detection and isolation of the described novel polynucleotides verifies that the genes encoding these sequences have not been inactivated by, for example, the covalent modification (methylation, acetylation, glycosylation, etc.) of the target cell genome, or inhibiting the function of transcriptional control elements. The fact that the genes have not been inactivated in the target cell genome can indicate an involvement in cellular metabolism, catabolism, homeostasis, or any of a wide variety of developmental and cell differentiation processes or the regulation of physiological or endocrine functions in the body, etc. (although treating the target cell with, for example, histone deacetylators can partially compensate for such inactivation and expand the target size of a given trapping construct). These data are especially useful when correlated with cDNA data from differentiated tissues and/or cells or cell lines in order to determine whether the absence of expression is regulated at the level of transcription or gene inactivation.

[0042] 5.1 Polynucleotides of the Present Invention

[0043] The nucleotide sequences of the various isolated human GTSs of the present invention appear in the Sequence Listing as SEQ ID NOS:9-1008. Additional embodiments of the present invention are GTS variants, or homologs, paralogs, orthologs, etc., which include isolated polynucleotides, or complements thereof, that hybridize to one or more of the disclosed GTSs of SEQ ID NOS:9-1008 under stringent, or preferably highly stringent, conditions. By way of example and not limitation, high stringency hybridization conditions can be defined as follows: Prehybridization of filters containing DNA to be screened is carried out for 8 h to overnight at 65° C. in a buffer containing 6×SSC, 50 mM Tris-HCl (pH 7.5), 1 mM EDTA, 0.02% PVP, 0.02% Ficoll, 0.02% BSA, and 500 μg/ml denatured salmon sperm DNA. Filters are hybridized for 48 h at 65° C. in prehybridization mixture containing 100 μg/ml denatured salmon sperm DNA and 5-20×10⁶ cpm of ³²P-labeled probe (alternatively, as in all hybridizations described herein, approximately 42, 44, 46, 48, 50, 52, 54, 56, 58, 62, 64, 66, 68, 70, or about 72 degrees or more can be used). The filters are then washed in approximately 1× wash mix (10× wash mix contains 3M NaCl, 0.6M Tris base, and 0.02M EDTA, alternatively, as with all washes described herein, 2×, 3×, 4×, 5×, 6× wash mix, or more, can be used) twice for 5 minutes each at room temperature, then in 1× wash mix containing 1% SDS at 60° C. (alternatively, as in all washes described herein, approximately 42, 44, 46, 48, 50, 52, 54, 56, 58, 62, 64, 66, 68, 70, or about 72 degrees or more can be used) for about 30 min, and finally in 0.3× wash mix (alternatively, as in all final washes described herein, approximately, 0.2×, 0.4×, 0.6×, 0.8×, 1×, or any concentration between about 2× and about 6× can be used in conjunction with a suitable wash temperature) containing 0.1% SDS at 60° C. (alternatively, approximately 42, 44, 46, 48, 50, 52, 54, 56, 58, 62, 64, 66, 68, 70, or about 72 degrees or more can be used) for about 30 min. The filters are then air dried and exposed to x-ray film for autoradiography. In an alternative protocol, washing of filters is done for 37° C. for 1 h in a solution containing 2×SSC, 0.01% PVP, 0.01% Ficoll, and 0.01% BSA. This is followed by a wash in 0.1×SSC at 50° C. for 45 min before autoradiography. Another example of hybridization under highly stringent conditions is hybridization to filter-bound DNA in 0.5 M NaHPO₄, 7% sodium dodecyl sulfate (SDS), 1 mM EDTA at 65° C., and washing in 0.1×SSC/0.1% SDS at 68° C. (Ausubel F. M. et al., eds., 1989, Current Protocols in Molecular Biology, Vol. 1, Green Publishing Associates, Inc., and John Wiley & sons, Inc., New York, at p. 2.10.3).

[0044] Preferably, such GTS variants will encode at least a portion or domain of a, preferably naturally occurring, protein or polypeptide that encodes a functional equivalent to a protein or polypeptide, or portion or domain thereof, encoded by the disclosed GTSs. Additional examples of GTS variants include polynucleotides, or complements thereof, that are capable of binding to the disclosed GTSs under less stringent conditions, such as moderately stringent conditions, (e.g., washing in 0.2×SSC/0.1% SDS at 42° C. (Ausubel et al., 1989, supra). Moderately stringent conditions can be additionally defined, for example, as follows: Filters containing DNA are pretreated for 6 h at 55° C. in a solution containing 6×SSC, 5× Denhart's solution, 0.5% SDS and 100 μg/ml denatured salmon sperm DNA. Hybridizations are carried out in the same solution and 5-20×10⁶ cpm ³²P-labeled probe is used. Filters are incubated in hybridization mixture for 18-20 h at 55° C. (alternatively, as in all hybridizations described herein, approximately 42, 44, 46, 48, 50, 52, 54, 56, 58, 62, 64, 66, 68, 70, or about 72 degrees or more can be used in combination with a suitable concentration of salt). The filters are then washed in approximately 1× wash mix (10× wash mix contains 3M NaCl, 0.6M Tris base, and 0.02M EDTA, alternatively, as with all washes described herein, 2×, 3×, 4×, 5×, 6× wash mix, or more, can be used) twice for 5 minutes each at room temperature, then in 1× wash mix containing 1% SDS at 60° C. (alternatively, as in all washes described herein, approximately, 42, 44, 46, 48, 50, 52, 54, 56, 58, 62, 64, 66, 68, 70, or about 72 degrees or more can be used) for about 30 min, and finally in 0.3× wash mix (alternatively, as in all final washes described herein approximately 0.2×, 0.4×, 0.6×, 0.8×, 1×, or any concentration between about 2× and about 6× can be used in conjunction with a suitable wash temperature) containing 0.1% SDS at 60° C. (alternatively, approximately 42, 44, 45, 48, 50, 52, 54, 56, 58, 62, 64, 66, 68, 70, or about 72 degrees or more can be used) for about 30 min. The filters are then air dried and exposed to x-ray film for autoradiography.

[0045] In an alternative protocol, washing of filters is done twice for 30 minutes at 60° C. in a solution containing 1×SSC and 0.1% SDS. Filters are blotted dry and exposed for autoradiography.

[0046] Other conditions of moderate stringency which may be used are well-known in the art. For example, washing of filters can be done at 37° C. for 1 h in a solution containing 2×SSC, 0.1% SDS. Another example of hybridization under moderately stringent conditions is washing in 0.2×SSC/0.1% SDS at 42° C. (Ausubel et al., 1989, supra). Such less stringent conditions may also be, for example, low stringency hybridization conditions. By way of example and not limitation, procedures using such conditions of low stringency are as follows (see also Shilo and Weinberg, 1981, Proc. Natl. Acad. Sci. USA 78:6789-6792): Filters containing DNA are pretreated for 6 h at 40° C. in a solution containing 35% formamide, 5×SSC, 50 mM Tris-HCl (pH 7.5), 5 mM EDTA, 0.1% PVP, 0.1% Ficoll, 1% BSA, and 500 μg/ml denatured salmon sperm DNA. Hybridizations are carried out in the same solution with the following modifications: 0.02% PVP, 0.02% Ficoll, 0.2% BSA, 100 μg/ml salmon sperm DNA, 10% (wt/vol) dextran sulfate, and 5-20×10⁶ cpm ³²P-labeled probe is used. Filters are incubated in hybridization mixture for 18-20 h at 40° C. (alternatively, as in all hybridizations described herein, approximately 42, 44, 46, 48, 50, 52, 54, 56, 58, 62, 64, 66, 15 68, 70, or about 72 degrees or more can be used). The filters are then washed in approximately 1× wash mix (10× wash mix contains 3M NaCl, 0.6M Tris base, and 0.02M EDTA, alternatively, as with all washes described herein, 2×, 3×, 4×, 5×, 6× wash mix, or more, can be used) twice for five minutes each at room temperature, then in 1× wash mix containing 1% SDS at 60° C. (alternatively, as in all washes described herein, approximately 42, 44, 46, 48, 50, 52, 54, 56, 58, 62, 64, 66, 68, 70, or about 72 degrees or more can be used) for about 30 min, and finally in 0.3× wash mix (alternatively, as in all final washes described herein, approximately, 0.2×, 0.4×, 0.6×, 0.8×, 1×, or any concentration between about 2× and about 6× can be used in conjunction with a suitable wash temperature) containing 0.1% SDS at 60° C. (alternatively, approximately 42, 44, 46, 48, 50, 52, 54, 56, 58, 62, 64, 66, 68, 25 70, or about 72 degrees or more can be used) for about 30 min. The filters are then air dried and exposed to x-ray film for autoradiography. In yet another alternative protocol, washing of filters is done for 1.5 h at 55° C. in a solution containing 2×SSC, 25 mM Tris-HCl (pH 7.4), 5mM EDTA, and 0.1% SDS. The wash solution is replaced with fresh solution and incubated an additional 1.5 h at 60° C. Filters are then blotted dry and exposed for autoradiography. If necessary, filters are washed for a third time at 65-68° C. and reexposed to film. Other conditions of low stringency which may be used are well known in the art (e.g., as employed for cross-species hybridizations). Preferably, GTS variants identified or isolated using the above methods will also encode a functionally equivalent gene product (i.e., protein, polypeptide, or domain thereof, encoding or otherwise associated with a function or structure at least partially encoded by the complementary GTS).

[0047] Additional embodiments contemplated by the present invention include any polynucleotide sequence comprising a continuous stretch of nucleotide sequence originally disclosed in, or otherwise unique to, any of the GTSs of SEQ ID NOS:9-1008 that are at least 8, or at least 10, or at least 14, or at least 20, or at least 30, or at least about 40, and preferably at least about 60 consecutive nucleotides up to about several hundred bases of nucleotide sequence or an entire GTS sequence. Functional equivalents of the gene products of SEQ ID NOS:9-1008 include naturally occurring variants of SEQ ID NOS:9-1008 present in other species, and mutant variants, both naturally occurring and engineered, which retain at least some of the functional activities of the gene products of SEQ ID NOS:9- 1008.

[0048] The invention also includes degenerate variants of the claimed GTS sequences, and products encoded thereby. Such variants may be 80% identical to any one of SEQ ID NOS: 9-1008, more preferably 85%, more preferably 90%, more preferably 95% and most preferably 98% identical. The degree of identity (or the degree of homology) of a polynucleotide sequence to any one of SEQ ID NOS: 9-1008 may be determined using any sequence analysis program known in the art, for example, the University of Wisconsin GCG sequence analysis package, SEQUENCHER 3.0, Gene Codes Corp., Ann Arbor, Mich. The invention further includes GTS derivatives wherein any of the disclosed GTSs, or GTS variants, is linked to another polynucleotide molecule, or a fragment thereof, wherein the link may be either directly or through other polynucleotides of any sequence and of a length of about 1,000 base pairs, or about 500 base pairs, or about 300 base pairs, or about 200 base pairs, or about 150 base pairs, or about 100 base pairs or about 50 base pairs, or less.

[0049] The invention also particularly includes polynucleotide molecules, including DNA, that hybridize to, and are therefore the complements of, the nucleotide sequences of the disclosed GTSs. Such hybridization conditions may be highly stringent or less highly stringent, as described above. In instances wherein the nucleic acid molecules are deoxyoligonucleotides (“DNA oligos”), highly stringent conditions may refer to, for example, washing in 6×SSC/0.05% sodium pyrophosphate at 37° C. (for oligos having 14-base DNA oligos), 48° C. (for 17-base DNA oligos), 55° C. (for 20-base DNA oligos), and 60° C. (for 23-base oligos). Similar conditions are contemplated for RNA oligos corresponding to a portion of the disclosed GTS sequences.

[0050] These nucleic acid molecules may encode or act as antisense molecules to polynucleotides comprising at least a portion of the sequences shown in SEQ ID NOS:9-1008 that are useful, for example, to regulate the expression of genes comprising a nucleotide sequence of any of SEQ ID NOS:9-1008, and can also be used, for example, as antisense primers in amplification reactions of gene sequences. With respect to gene regulation, such techniques can be used to regulate, for example, developmental processes by modulating the expression of genes in embryonic stem cells. Further, such sequences may be used as part of ribozyme and/or triple helix sequences that can be used to regulate gene expression. Still further, such molecules may be used as components of diagnostic methods whereby, for example, the presence of a particular allele, of a gene that contains any of the sequences of SEQ ID NOS:9-1008 may be detected. Of particular interest is the use of the disclosed GTSs to conduct analysis of single nucleotide polymorphisms (SNPs), and particularly coding region SNPs or “cSNPs”, in the human genome, or as general or individual-specific forensic markers. When so applied, a collection of GTSs is obtained from an individual, and screened against a control database of cSNPs (or other genetic markers) that have previously been associated with disease, suitability or susceptibility (or sensitivity) to specific drugs or therapies, or virtually any other human trait that correlates with a given cSNP or genetic marker, or assortment thereof. In addition to disease/diagnostic testing, the described GTSs are also useful as genetic markers for the prenatal analysis of congenital traits or defects.

[0051] In addition to the nucleotide sequences described above, full length cDNA or gene sequences that contain any of SEQ ID NOS:9-1008 present in the same species and/or homologs of any of those genes present in other species can be identified and isolated by using molecular biological techniques known in the art.

[0052] In order to clone the full length cDNA sequence from any species encoding the cDNA corresponding to the entire messenger RNA or to clone variant or heterologous forms of the molecule, labeled DNA probes made from nucleic acid fragments corresponding to any of the partial cDNA disclosed herein may be used to screen a cDNA library. For example, oligonucleotides corresponding to either the 5′ or 3′ terminus of the cDNA sequence may be used to obtain longer nucleotide sequences. Briefly, the library may be plated out to yield a maximum of about 30,000 pfu for each 150 mm plate. Approximately 40 plates may be screened. The plates are incubated at 37° C. until the plaques reach a diameter of 0.25 mm or are just beginning to make contact with one another (3-8 hours). Nylon filters are placed onto the soft top agarose and after 60 seconds, the filters are peeled off and floated on a DNA denaturing solution consisting of 0.4N sodium hydroxide. The filters are then immersed in neutralizing solution consisting of 1 M Tris HCl, pH 7.5, before being allowed to air dry. The filters are prehybridized in casein hybridization buffer containing 10% dextran sulfate, 0.5 M NaCl, 50 mM Tris HCL, pH 7.5, 0.1% sodium pyrophosphate, 1% casein, 1% SDS, and denatured salmon sperm DNA at 0.5 mg/ml for 6 hours at 60° C. The radiolabelled probe is then denatured by heating to 95° C. for 2 minutes and then added to the prehybridization solution containing the filters. The filters are hybridized at 60° C. (alternatively, as in all hybridizations described herein, approximately 42, 44,46, 48, 50. 52, 54, 56, 58, 62, 64, 66, 68, 70, or about 72 degrees or more can be used) for about 16 hours. The filters are then washed in approximately 1× wash mix (10× wash mix contains 3M NaCl, 0.6M Tris base, and 0.02M EDTA, alternatively, as with all washes described herein, 2×, 3×, 4×, 5×, 6× wash mix, or more, can be used) twice for 5 minutes each at room temperature, then in 1× wash mix containing 1% SDS at 60° C. (alternatively, as in all washes described herein, approximately 42, 44, 46, 48, 50. 52, 54, 56, 58, 62, 64, 66, 68, 70, or about 72 degrees or more can be used) for about 30 min, and finally in 0.3× wash mix (alternatively, as in all final washes described herein, approximately, 0.2×, 0.4×, 0.6×, 0.8×, 1×, or any concentration between about 2× and about 6× can be used in conjunction with a suitable wash temperature) containing 0.1% SDS at 60° C. (alternatively, approximately 42, 44, 46, 48, 50. 52, 54, 56, 58, 62, 64, 66, 68, 70, or about 72 degrees or more can be used) for about 30 min. The filters are then air dried and exposed to x-ray film for autoradiography. After developing, the film is aligned with the filters to select a positive plaque. If a single, isolated positive plaque cannot be obtained, the agar plug containing the plaques will be removed and placed in lambda dilution buffer containing 0.1M NaCl, 0.01M magnesium sulfate, 0.035M Tris HCl, pH 7.5, 0.01% gelatin. The phage may then be replated and rescreened to obtain single, well isolated positive plaques. Positive plaques may be isolated and the cDNA clones sequenced using primers based on the known cDNA sequence. This step may be repeated until a full length cDNA is obtained.

[0053] It may be necessary to screen multiple cDNA libraries from different sources/tissues to obtain a full length cDNA. In the event that it is difficult to identify cDNA clones encoding the complete 5′ terminal coding region, an often encountered situation in cDNA cloning, the RACE (Rapid Amplification of cDNA Ends) technique may be used. RACE is a proven PCR-based strategy for amplifying the 5′ end of incomplete cDNAs. 5′-RACE-Ready cDNA synthesized from human fetal liver containing a unique anchor sequence is commercially available (Clontech). To obtain the 5′ end of the cDNA, PCR is carried out, for example, on 5′-RACE-Ready cDNA using the provided anchor primer and the 3′ primer. A secondary PCR reaction is then carried out using the anchored primer and a nested 3′ primer according to the manufacturer's instructions.

[0054] Once obtained, the full length cDNA sequence may be translated into amino acid sequence and examined for certain landmarks found in the amino acid sequences encoded by SEQ ID NOS:9-1008, or any structural similarities to these disclosed sequences.

[0055] The identification of homologs, heterologs, or paralogs of SEQ ID NOS:9-1008 in other, preferably related, species can be useful for developing additional animal model systems that are closely related to humans for purposes of drug discovery. Genes at other genetic loci within the genome that encode proteins which have extensive homology to one or more domains of the gene products encoded by SEQ ID NOS:9-1008 can also be identified via similar techniques. In the case of cDNA libraries, such screening techniques can identify clones derived from alternatively spliced transcripts in the same or different species.

[0056] Screening can be done using filter hybridization with duplicate filters. The labeled probe can contain at least 15-30 base pairs of the nucleotide sequence presented in SEQ ID NOS:9-1008. The hybridization washing conditions used should be of a lower stringency when the cDNA library is derived from an organism different from, or heterologous to, the type of organism from which the labeled sequence was derived. With respect to the cloning of a mammalian homolog, heterolog, ortholog, or paralog, using probes derived from any of the sequences of SEQ ID NOS:9-1008, for example, hybridization can, for example, be performed at 65° C. overnight in Church's buffer (7% SDS, 250 mM NaHPO₄, 2 mM EDTA, 1% BSA). Washes can be done with 2×SSC,0.1% SDS at 65° C. and then at 0.1×SSC,0.1% SDS at 65° C.

[0057] Low stringency conditions are well known to those of skill in the art, and will vary predictably depending on the specific organisms from which the library and the labeled sequences are derived. For guidance regarding such conditions see, for example, Sambrook et al., 1989, Molecular Cloning, A Laboratory Manual, Cold Springs Harbor Press, N.Y.; and Ausubel et al., 1989, Current Protocols in Molecular Biology, Green Publishing Associates and Wiley Interscience, N.Y.

[0058] Alternatively, the labeled nucleotide probe of a sequence of any of SEQ ID NOS:9-1008 may be used to screen a genomic library derived from the organism of interest, again, using appropriately stringent conditions. The identification and characterization of human genomic clones is helpful for designing diagnostic tests and clinical protocols for treating disorders in human patients that are known or suspected to be linked to disease or other developmental or cell differentiation disorders and abnormalities. For example, sequences derived from regions adjacent to the intron/exon boundaries of the human gene can be used to design primers for use in amplification assays to detect mutations within the exons, introns, splice sites (e.g., splice acceptor and/or donor sites), etc., that can be used in diagnostics.

[0059] Further, gene homologs can also be isolated from nucleic acid of the organism of interest by performing PCR using two oligonucleotide primers derived from SEQ ID NOS:9-1008 or two degenerate oligonucleotide primer pools designed on the basis of amino acid sequences within the gene products encoded by SEQ ID NOS:9-1008. The template for the reaction may be cDNA obtained by reverse transcription of mRNA prepared from, for example, human or non-human cell lines, cell types, or tissues, like, for example, ES cells from the organism of interest.

[0060] The PCR product may be subcloned or sequenced directly or subcloned and sequenced to ensure that the amplified sequences represent the sequences of the gene corresponding to the sequence of SEQ ID NOS:9-1008 of interest. The PCR fragment may then be used to isolate a full length cDNA clone by a variety of methods. For example, the amplified fragment may be labeled and used to screen a cDNA library, such as a bacteriophage cDNA library. Alternatively, the labeled fragment may be used to isolate genomic clones via the screening of a genomic library.

[0061] PCR technology may also be utilized to isolate full length cDNA sequences. For example, RNA can be isolated using standard procedures from an appropriate cellular source (i.e., one known, or suspected, to express the gene corresponding to the sequence of SEQ ID NOS:9-1008 of interest, such as, for example, ES cells). A reverse transcription reaction may be performed on the RNA using an oligonucleotide primer specific for the most 5′ end of the amplified fragment for the priming of first strand synthesis. The resulting RNA/DNA hybrid may then be “tailed” with guanines, for example, using a standard terminal transferase reaction, the hybrid may be digested with RNase H, and second strand synthesis may then be primed with a poly-C primer. Thus, cDNA sequences upstream from the amplified fragment may easily be isolated. For a review of cloning strategies which may be used, see e.g., Sambrook et al., 1989, supra. Alternatively, cDNA or genomic libraries can be screened using 5′ PCR primers that hybridize to vector sequences and 3′ PCR primers specific to the gene of interest. Typically, such primers comprise oligonucleotide “priming” sequences first disclosed in, or otherwise unique to, one of the GTSs of SEQ ID NOS:9-1008.

[0062] The sequence of a gene corresponding to any of the sequences of SEQ ID NOS:9-1008 can also be used to isolate mutant alleles of that gene. Such mutant alleles may be isolated from individuals either known or suspected to have a genotype which contributes to the disease of interest or other symptoms of developmental and cell differentiation and/or proliferation disorders and abnormalities. Mutant alleles and mutant allele products may then be utilized in the therapeutic and diagnostic programs described below. Additionally, such sequences of any of the genes corresponding to SEQ ID NOS:9-1008 can be used to detect gene regulatory (e.g., promoter or promoter/enchancer) defects which can affect development or cell differentiation.

[0063] A cDNA of a mutant gene corresponding to any of the sequences of SEQ ID NOS:9-1008 can be isolated as discussed above, or, for example, by using PCR. In this case, the first cDNA strand may be synthesized by hybridizing an oligo-dT oligonucleotide to mRNA isolated from cells derived from an individual suspected of carrying a mutant gene corresponding to any of the sequences of SEQ ID NOS:9-1008 by extending the new strand with reverse transcriptase. The second strand of the cDNA is then synthesized using an oligonucleotide that hybridizes specifically to the 5′ region of the normal gene. The amplified product can be directly sequenced or cloned into a suitable vector and subsequently subjected to DNA sequence analysis. By comparing the DNA sequence of the mutant allele to that of the normal allele, the mutation(s) responsible for the loss or alteration of function of the mutant gene product can be ascertained.

[0064] Alternatively, a genomic library can be constructed using DNA obtained from one or more individuals suspected of carrying, or known to carry, a mutant allele corresponding to any of SEQ ID NOS:9-1008. Corresponding mutant cDNA libraries can be also constructed using RNA from cell types known, or suspected, to express such mutant alleles. The corresponding normal gene, or any suitable fragment thereof, may then be labeled and used as a probe to identify the corresponding mutant allele in such libraries. Clones containing the mutant gene sequences may then be identified and analyzed by DNA sequence analysis. Additionally, a protein expression library can be constructed utilizing cDNA synthesized from, for example, RNA isolated from a cell type known, or suspected, to express a mutant allele corresponding to any of the sequences of SEQ ID NOS:9-1008 from an individual suspected of, carrying or known to carry, such a mutant allele. In this manner, gene products made by the putatively mutant cell type may be expressed and screened using standard antibody screening techniques in conjunction with antibodies raised against the corresponding normal gene product or a portion thereof, as described below in Section 5.4 (For screening techniques, see, for example, Harlow, E. and Lane, eds., 1988, “Antibodies: A Laboratory Manual”, Cold Spring Harbor Press, Cold Spring Harbor.) Additionally, screening can be accomplished by screening with labeled fusion proteins. In cases where a mutation results in an expressed gene product with altered function (e.g., as a result of a missense or a frame shift mutation), a polyclonal set of antibodies to the wild-type gene product are likely to cross-react with the mutant gene product. Library clones detected via their reaction with such labeled antibodies can be purified and subjected to sequence analysis according to methods well known to those of skill in the art.

[0065] The invention also encompasses nucleotide sequences that encode mutant isoforms of any of the amino acid sequences encoded by the GTSs of SEQ ID NOS:9-1008, peptide fragments thereof, truncated versions thereof, and fusion proteins including any of the above. Examples of such fusion proteins can include, but not limited to, an epitope tag which aids in purification or detection of the resulting fusion protein; or an enzyme, fluorescent protein, luminescent protein which can be used as a marker.

[0066] The present invention additionally encompasses (a) RNA or DNA vectors that contain any portion of SEQ ID NOS:9-1008 and/or their complements as well as any of the peptides or proteins encoded thereby; (b) DNA vectors that contain a cDNA that substantially spans the entire open reading frame corresponding to any of the sequences of SEQ ID NOS:9-1008 and/or their complements; (c) DNA expression vectors that have or contain any of the foregoing sequences, or a portion thereof, operatively associated with a (d) genetically engineered host cells that contain a cDNA that spans the entire open reading frame, or any portion thereof, corresponding to any of the sequences of SEQ ID NOS:9-1008 operatively associated with a regulatory element, generally recombinantly positioned either in vivo (such as in gene activation) or in vitro that directs the expression of the coding sequences in the host cell. As used herein, regulatory elements include, but are not limited to, inducible and non-inducible promoters, enhancers, operators and other elements known to those skilled in the art that drive and regulate expression. Such regulatory elements include, but are not limited to, the baculovirus promoter, cytomegalovirus hCMV immediate early gene promoter, the early or late promoters of SV40 adenovirus, the lac system, the trp system, the TAC system, the TRC system, the major operator and promoter regions of phage A, the control regions of fd coat protein, acid phosphatase promoters, phosphoglycerate kinase (PGK) and especially 3-phosphoglycerate kinase promoters, and yeast alpha mating factors.

[0067] An additional application of the described novel human polynucleotide sequences is their use in the molecular mutagenesis/evolution of proteins that are at least partially encoded by the described novel sequences using, for example, polynucleotide shuffling or related methodologies. Such approaches are described in U.S. Pat. Nos. 5,830,721 and 5,837,458 hich are herein incorporated by reference in their entirety.

[0068] 5.2 Proteins and Polypeptides Encoded by Polynucleotides Expressed in Modified Human Cells

[0069] Peptides and proteins encoded by the open reading frame of mRNAs corresponding to SEQ ID NOS:9-1008, polypeptides and peptide fragments, mutated, truncated or deleted forms of those peptides and proteins, fusion proteins containing any of those peptides and proteins can be prepared for a variety of uses, including, but not limited to, the generation of antibodies, as reagents in diagnostic assays, the identification of other cellular gene products involved in the regulation of development and cellular differentiation of various cell types, like, for example, ES cells, as reagents in assays for screening for compounds that can be used in the treatment of disorders affecting development and cell differentiation, and as pharmaceutical reagents useful in the treatment of disorders affecting development and cell differentiation.

[0070] The invention also encompasses proteins, peptides, and polypeptides that are functionally equivalent to those encoded by SEQ ID NOS:9-1008. Such functionally equivalent products include, but are not limited to, additions or substitutions of amino acid residues within the amino acid sequence encoded by the nucleotide sequences described above, but which result in a silent change, thus producing a functionally equivalent gene product. Amino acid substitutions can be made on the basis of similarity in polarity, charge, solubility, hydrophobicity, hydrophilicity, and/or the amphipathic nature of the residues involved. For example, nonpolar (hydrophobic) amino acids include alanine, leucine, isoleucine, valine, proline, phenylalanine, tryptophan, and methionine; polar neutral amino acids include glycine, serine, threonine, cysteine, tyrosine, asparagine, and glutamine; positively charged (basic) amino acids include arginine, lysine, and histidine; and negatively charged (acidic) amino acids include aspartic acid and glutamic acid.

[0071] While random mutations can be introduced into DNA encoding peptides and proteins of the current invention (using random mutagenesis techniques well known to those skilled in the art), and the resulting mutant peptides and proteins tested for activity, site-directed mutations of the coding sequence can be engineered (using standard site-directed mutagenesis techniques) to generate mutant peptides and proteins of the current invention having increased functionality.

[0072] For example, the amino acid sequence of peptides and proteins of the current invention can be aligned with homologs from different species. Mutant peptides and proteins can be engineered so that regions of interspecies identity are maintained, whereas the variable residues are altered, e.g., by deletion or insertion of an amino acid residue(s) or by substitution of one or more different amino acid residues. Conservative alterations at the variable positions can be engineered in order to produce a mutant form of a peptide or protein of the current invention that retains function. Non-conservative changes can be engineered at these variable positions to alter function. Alternatively, where alteration of function is desired, deletion or non-conservative alterations of the conserved regions can be engineered. One of skill in the art may easily test such mutant or deleted form of a peptide or protein of the current invention for these alterations in function using the teachings presented herein.

[0073] Other mutations to the coding sequences described above can be made to generate peptides and proteins that are better suited for expression, scale up, etc. in the host cells chosen. For example, the triplet code for each amino acid can be modified to conform more closely to the preferential codon usage of the host cell's translational machinery, or, for example, to yield a messenger RNA molecule with a longer half-life. Those skilled in the art would readily know what modifications of the nucleotide sequence would be desirable to conform the nucleotide sequence to preferential codon usage or to make the messenger RNA more stable. Such information would be obtainable, for example, through use of computer programs, through review of available research data on codon usage and messenger RNA stability, and through other means known to those of skill in the art.

[0074] Peptides corresponding to one or more domains (or a portion of a domain) of one of the proteins described above, truncated or deleted proteins, as well as fusion proteins in which the full length protein described above, a subunit peptide or truncated version is fused to an unrelated protein are also within the scope of the invention and can be designed by those of skill in the art on the basis of experimental or functional considerations. Such fusion proteins include, but are not limited to, fusions to an epitope tag; or fusions to an enzyme, fluorescent protein, or luminescent protein which provide a marker function.

[0075] While the peptides and proteins of the current invention can be chemically synthesized (e.g., see Creighton, 1983, Proteins: Structures and Molecular Principles, W.H. Freeman & Co., N.Y.), large polypeptides derived from any of the polynucleotides described above may advantageously be produced by recombinant DNA technology using techniques well known in the art for expressing genes and/or coding sequences. These methods include, for example, in vitro recombinant DNA techniques, synthetic techniques, and in vivo genetic recombination. See, for example, the techniques described in Sambrook et al., 1989, supra, and Ausubel et al., 1989, supra. Alternatively, RNA capable of encoding any of the nucleotide sequences described above may be chemically synthesized using, for example, synthesizers. See, for example, the techniques described in “Oligonucleotide Synthesis”, 1984, Gait, M. J. ed., IRL Press, Oxford, which is incorporated by reference herein in its entirety.

[0076] A variety of host-expression vector systems may be utilized to express the nucleotide sequences of the invention. Where the peptide or protein to be synthesized is a soluble derivative, the peptide or polypeptide can be recovered from the culture, i.e., from the host cell in cases where the peptide or polypeptide is not secreted, and from the culture media in cases where the peptide or polypeptide is secreted by the cells. However, such engineered host cells themselves may be used in situations where it is important not only to retain the structural and functional characteristics of the expressed peptide or protein, but to assess biological activity, e.g., in drug screening assays.

[0077] The expression systems that may be used for purposes of the invention include, but are not limited to, microorganisms such as bacteria (e.g., E. coli, B. subtilis) transformed with recombinant bacteriophage DNA, plasmid DNA or cosmid DNA expression vectors containing a nucleotide sequence of the current invention; yeast (e.g., Saccharomyces, Pichia) transformed with recombinant yeast expression vectors containing a nucleotide sequence of the current invention; insect cell systems infected with recombinant virus expression vectors (e.g., baculovirus) containing a nucleotide sequence of the current invention; plant cell systems infected with recombinant virus expression vectors (e.g., cauliflower mosaic virus, CaMV; tobacco mosaic virus, TMV) or transformed with recombinant plasmid expression vectors (e.g., Ti plasmid) containing a nucleotide sequence of the current invention; or mammalian cell systems (e.g., COS, CHO, BHK, 293, 3T3, U937) harboring recombinant expression constructs containing promoters derived from the genome of mammalian cells (e.g., metallothionein promoter) or from mammalian viruses (e.g., the adenovirus late promoter; the vaccinia virus 7.5K promoter).

[0078] In bacterial systems, a number of expression vectors may be advantageously selected depending upon the use intended for the gene product being expressed. For example, when large quantities of such a protein are to be produced for the generation of pharmaceutical compositions of a protein or for raising antibodies to the protein to be expressed, for example, vectors which direct the expression of high levels of fusion protein products that are readily purified may be desirable. Such vectors include, but are not limited to, the E. coli expression vector pUR278 (Ruther et al., 1983, EMBO J. 2:1791), in which the coding sequence of the polynucleotide to be expressed may be ligated individually into the vector in frame with the lacZ coding region so that a fusion protein is produced; pIN vectors (Inouye & Inouye, 1985, Nucleic Acids Res. 13:3101-3109; Van Heeke & Schuster, 1989, J. Biol. Chem. 264:5503-5509); and the like. pGEX vectors may also be used to express foreign polypeptides as fusion proteins with glutathione S-transferase (GST). If the inserted sequence encodes a relatively small polypeptide (less than 25 kD), such fusion proteins are generally soluble and can easily be purified from lysed cells by adsorption to glutathione-agarose beads followed by elution in the presence of free glutathione. The pGEX vectors are designed to include thrombin or factor Xa protease cleavage sites so that the cloned target gene product can be released from the GST moiety. Alternatively, if the resulting fusion protein is insoluble and forms inclusion bodies in the host cell, the inclusion bodies may be purified and the recombinant protein solubilized using techniques well known to one of skill in the art.

[0079] In an insect system, Autographa californica nuclear polyhidrosis virus (AcNPV) may be used as a vector to express foreign genes. (e.g., see Smith et al., 1983, J. Virol. 46: 584; Smith, U.S. Pat. No. 4,215,051). In one embodiment of the current invention, Sf9 insect cells are infected with a baculovirus vector expressing a peptide or protein of the current invention.

[0080] In mammalian host cells, a number of viral-based expression systems may be utilized. Specific embodiments (described more fully below) include the gene trap cDNA sequences of the current invention that are expressed by a CMV promoter to transiently express recombinant protein in U937 cells or in Cos-7 cells. Alternatively, retroviral vector systems well known in the art may be used to insert the recombinant expression construct into host cells, or vaccinia virus-based expression systems may be employed.

[0081] In yeast, a number of vectors containing constitutive or inducible promoters may be used. For a review, see Current Protocols in Molecular Biology, Vol. 2, 1988, Ed. Ausubel et al., Greene Publish. Assoc. & Wiley Interscience, Ch. 13; Grant et al., 1987, Expression and Secretion Vectors for Yeast, in Methods in Enzymology, Eds. Wu & Grossman, 1987, Acad. Press, N.Y., Vol.153, pp. 516-544; Glover, 1986, DNA Cloning, Vol. II, IRL Press, Wash., D.C., Ch. 3; and Bitter, 1987, Heterologous Gene Expression in Yeast, Methods in Enzymology, Eds. Berger & Kimmel, Acad. Press, N.Y., Vol. 152, pp. 673-684; and The Molecular Biology of the Yeast Saccharomyces, 1982, Eds. Strathem et al., Cold Spring Harbor Press, Vols. I and II.

[0082] In cases where plant expression vectors are used, the expression of the coding sequence may be driven by any of a number of promoters. For example, viral promoters such as the 35S RNA and 19S RNA promoters of CaMV (Brisson et al, 1984, Nature, 310:511-514), or the coat protein promoter of TMV (Takamatsu et al., 1987, EMBO J. 6:307-311) may be used; alternatively, plant promoters such as the small subunit of RUBISCO (Coruzzi et al., 1984, EMBO J. 3:1671-1680; Broglie et al., 1984, Science 224:838-843); or heat shock promoters, e.g., soybean hsp17.5-E or hsp17.3-B (Gurley et al., 1986, Mol. Cell. Biol. 6:559-565) may be used. These constructs can be introduced into plant cells using Ti plasmids, Ri plasmids, plant virus vectors, direct DNA transformation, microinjection, electroporation, etc. For reviews of such techniques see, for example, Weissbach & Weissbach, 1988, Methods for Plant Molecular Biology, Academic Press, NY, Section VIII, pp. 421-463; and Grierson & Corey, 1988, Plant Molecular Biology, 2d Ed., Blackie, London, Ch. 7-9.

[0083] In cases where an adenovirus is used as an expression vector, the nucleotide sequence of interest may be ligated to an adenovirus transcription/translation control complex, e.g., the late promoter and tripartite leader sequence. This chimeric gene may then be inserted in the adenovirus genome by in vitro or in vivo recombination. Insertion in a non-essential region of the viral genome (e.g., region E1 or E3) will result in a recombinant virus that is viable and capable of expressing the gene product of interest in infected hosts. (e.g., See Logan & Shenk, 1984, Proc. Natl. Acad. Sci. USA 81:3655-3659). Specific initiation signals may also be required for efficient translation of inserted nucleotide sequences of interest. These signals include the ATG initiation codon and adjacent sequences. In cases where an entire gene or cDNA, including its own initiation codon and adjacent sequences, is inserted into the appropriate expression vector, no additional translational control signals may be needed. However, in cases where only a portion of a coding sequence of interest is inserted, exogenous translational control signals, including, perhaps, the ATG initiation codon, must be provided. Furthermore, the initiation codon must be in phase with the reading frame of the desired coding sequence to ensure translation of the entire insert. These exogenous translational control signals and initiation codons can be of a variety of origins, both natural and synthetic. The efficiency of expression may be enhanced by the inclusion of appropriate transcription enchanter elements, transcription terminators, etc. (See Bittner et al., 1987, Methods in Enzymol. 153:516-544).

[0084] In addition, a host cell strain may be chosen which modulates the expression of the inserted sequences, or modifies and processes the gene product in the specific fashion desired. Such modifications (e.g., glycosylation) and processing (e.g., cleavage) of protein products may be important for the function of the protein. Different host cells have characteristic and specific mechanisms for the post-translational processing and modification of proteins and gene products. Appropriate cell lines or host systems can be chosen to ensure the correct modification and processing of the foreign protein expressed. To this end, eukaryotic host cells which possess the cellular machinery for proper processing of the primary transcript may be used. Such mammalian host cells include, but are not limited to, CHO, VERO, BHK, HeLa, COS, MDCK, 293, 3T3, WI38, and U937 cells.

[0085] For long-term, high-yield production of recombinant proteins, stable expression is preferred. For example, cell lines which stably express the sequences of interest described above may be engineered. Rather than using expression vectors which contain viral origins of replication, host cells can be transformed with DNA controlled by appropriate expression control elements (e.g., promoter, enchanter sequences, transcription terminators, polyadenylation sites, etc.), and a selectable marker. Following the introduction of the foreign DNA, engineered cells may be allowed to grow for 1-2 days in an enriched media, and then are switched to a selective media. The selectable marker in the recombinant plasmid confers resistance to the selection and allows cells to stably integrate the plasmid into their chromosomes and grow to form foci which in turn can be cloned and expanded into cell lines. This method may advantageously be used to engineer cell lines which express the gene product of interest. Such engineered cell lines may be particularly useful in screening and evaluation of compounds that affect the endogenous activity of the gene product of interest.

[0086] A number of selection systems may be used, including but not limited to the herpes simplex virus thymidine kinase (Wigler et al., 1977, Cell 11:223), hypoxanthine-guanine phosphoribosyltransferase (Szybalska & Szybalski, 1962, Proc. Natl. Acad. Sci. USA 48:2026), and adenine phosphoribosyltransferase (Lowy et al., 1980, Cell 22:817) genes can be employed in tk⁻, hgprt⁻ or aprt⁻ cells, respectively. Also, antimetabolite resistance can be used as the basis of selection for the following genes: dhfr, which confers resistance to methotrexate (Wigler et al., 1980, Natl. Acad. Sci. USA 77:3567; O'Hare et al., 1981, Proc. Natl. Acad. Sci. USA 78:1527); gpt, which confers resistance to mycophenolic acid (Mulligan & Berg, 1981, Proc. Natl. Acad. Sci. USA 78:2072); neo, which confers resistance to the aminoglycoside G-418 (Colberre-Garapin et al., 1981, J. Mol. Biol. 150:1); and hygro, which confers resistance to hygromycin (Santerre et al., 1984, Gene 30:147).

[0087] The gene products of interest can also be expressed in transgenic animals. Animals of any species, including, but not limited to, mice, rats, rabbits, guinea pigs, pigs, micro-pigs, goats, and non-human primates, e.g., baboons, monkeys, and chimpanzees may be used to generate transgenic animals carrying the polynucleotide of interest of the current invention.

[0088] Any technique known in the art may be used to introduce the transgene of interest into animals to produce the founder lines of transgenic animals. Such techniques include, but are not limited to pronuclear microinjection (Hoppe, P. C. and Wagner, T. E., 1989, U.S. Pat. No. 4,873,191); retrovirus mediated gene transfer into germ lines (Van der Putten et al., 1985, Proc. Natl. Acad. Sci., USA 82:6148-6152); gene targeting in embryonic stem cells (Thompson et al., 1989, Cell 56:313-321); electroporation of embryos (Lo, 1983, Mol Cell. Biol. 3:1803-1814); sperm-mediated gene transfer (Lavitrano et al., 1989, Cell 57:717-723); positive-negative selection as described in U.S. Pat. No. 5,464,764 herein incorporated by reference. For a review of such techniques, see Gordon, 1989, Transgenic Animals, Intl. Rev. Cytol. 115:171-229, which is incorporated by reference herein in its entirety.

[0089] The present invention provides for transgenic animals that carry the transgene of interest in all their cells, as well as animals which carry the transgene in some, but not all their cells, i.e., mosaic animals. The transgene may be integrated as a single transgene or in concatamers, e.g., head-to-head tandems or head-to-tail tandems. The transgene may also be selectively introduced into and activated in a particular cell type by following, for example, the teaching of Lasko et al. (Lasko, M. et al., 1992, Proc. Natl. Acad. Sci. USA 89:6232-6236). The regulatory sequences required for such a cell-type specific activation will depend upon the particular cell type of interest, and will be apparent to those of skill in the art. When it is desired that the transgene of interest be integrated into the chromosomal site of the endogenous copy of that same gene, gene targeting is preferred. Briefly, when such a technique is to be utilized, vectors containing some nucleotide sequences homologous to the endogenous gene of interest are designed for the purpose of integrating, via homologous recombination with chromosomal sequences, into and disrupting the function of the nucleotide sequence of the endogenous gene of interest. In this way, the expression of the endogenous gene may also be eliminated by inserting non-functional sequences into the endogenous gene. The transgene may also be selectively introduced into a particular cell type, thus inactivating the endogenous gene of interest in only that cell type, by following, for example, the teaching of Gu et al. (Gu et al., 1994, Science 265: 103-106). The regulatory sequences required for such a cell-type specific inactivation will depend upon the particular cell type of interest and will be apparent to those of skill in the art.

[0090] Once transgenic animals have been generated, the expression of the recombinant gene of interest may be assayed utilizing standard techniques. Initial screening may be accomplished by Southern blot analysis or PCR techniques to analyze animal tissues to assay whether integration of the transgene has taken place. The level of mRNA expression of the transgene in the tissues of the transgenic animals may also be assessed using techniques which include, but are not limited to, Northern blot analysis of cell type samples obtained from the animal, in situ hybridization analysis, and RT-PCR. Samples of gene-expressing tissue, may also be evaluated immunocytochemically using antibodies specific for the transgene product, as described below.

[0091] 5.3 Cells that Contain a Disrupted Allele of a Gene Encoding a Polynucleotide of the Current Invention

[0092] Another aspect of the current invention are cells which contain a gene that encodes a polynucleotide of the current invention and that has been disrupted. Those of skill in the art would know how to disrupt a gene in a cell using techniques known in the art. Also, techniques useful to disrupt a gene in a cell and especially an ES cell, that may already be disrupted, as disclosed in copending U.S. patent application Ser. Nos. 08/726,867; 08/728,963; 08/907,598; and 08/942,806, all of which are hereby incorporated herein by reference in their entirety, are within the scope of the current invention to disrupt a gene that encodes a polynucleotide of the current invention.

[0093] 5.3.1 Identification of Cells that Express Genes Encoding Polynucleotides of the Current Invention

[0094] Host cells that contain coding sequence and/or express a biologically active gene product, or fragment thereof, encoded by a gene corresponding to a GTS present invention may be identified by at least four general approaches; (a) DNA-DNA or DNA-RNA hybridization; (b) the presence or absence of “marker” gene functions; (c) assessing the level of transcription as measured by the expression of mRNA transcripts in the host cell; and (d) detection of the gene product as measured by immunoassay, enzymatic assay, chemical assay, or by its biological activity. Prior to screening for gene expression, the host cells can first be treated in an effort to increase the level of expression of genes encoding polynucleotides of the current invention, especially in cell lines that produce low amounts of the mRNAs and/or peptides and proteins of the current invention.

[0095] In the first approach, the presence of the coding sequence for peptides and proteins of the current invention inserted in the expression vector can be detected by DNA-DNA or DNA-RNA hybridization using probes comprising nucleotide sequences that are homologous to the coding sequence for peptides and proteins of the current invention, respectively, or portions or derivatives thereof.

[0096] In the second approach, the recombinant expression vector/host system can be identified and selected based upon the presence or absence of certain “marker” gene functions (e.g., thymidine kinase activity, resistance to antibiotics, resistance to methotrexate, transformation phenotype, occlusion body formation in baculovirus, etc.). For example, if the coding sequence for the peptide or protein of the current invention is inserted within a marker gene sequence of the vector, recombinants containing the coding sequence for the peptide or protein of the current invention can be identified by the absence of the marker gene function. Alternatively, a marker gene can be placed in tandem with the sequence for the peptide or protein of the current invention under the control of the same or different promoter used to control the expression of the coding sequence for the peptide or protein of the current invention. Expression of the marker in response to induction or selection indicates expression of the coding sequence for the peptide or protein of the current invention.

[0097] In the third approach, transcriptional activity for the coding region of genes specific for peptides and proteins of the current invention can be assessed by hybridization assays. For example, RNA can be isolated and analyzed by Northern blot using a probe derived from a GTS, or any portion thereof. Alternatively, total nucleic acids of the host cell may be extracted and assayed for hybridization to such probes. Additionally, RT-PCR (using GTS specific oligos/products) may be used to detect low levels of gene expression in a sample, or in RNA isolated from a spectrum of different tissues, or PCR can be used can be used to screen a variety of cDNA libraries derived from different tissues to determine which tissues express a given GTS.

[0098] In the fourth approach, the expression of the peptides and proteins of the current invention can be assessed immunologically, for example by Western blots, immunoassays such as radioimmuno-precipitation, enzyme-linked immunoassays and the like. This can be achieved by using an antibody and a binding partner specific to a peptide or protein of the current invention.

[0099] 5.4 Antibodies to Proteins of the Current Invention

[0100] Antibodies that specifically recognize one or more epitopes of a peptide or protein of the current invention, or epitopes of conserved variants of a peptide or protein at least partially encoded by a GTS of the present invention, or any and all peptide fragments thereof, are also encompassed by the invention. Such antibodies include, but are not limited to polyclonal antibodies, monoclonal antibodies (mAbs), humanized or chimeric antibodies, single chain antibodies, Fab fragments, F(ab′)₂ fragments, fragments produced by a Fab expression library, anti-idiotypic (anti-Id) antibodies, and epitope-binding fragments of any of the above.

[0101] The antibodies of the invention may be used, for example, in the detection of the peptide or protein of interest of the current invention in a biological sample and may, therefore, be utilized as part of a diagnostic or prognostic technique whereby patients may be tested for abnormal amounts of these proteins. Such antibodies may also be utilized in conjunction with, for example, compound screening schemes as described, below in Section 5.6 for the evaluation of the effect of test compounds on expression and/or activity of the gene products of interest of the current invention. Additionally, such antibodies can be used in conjunction with the gene therapy and gene delivery techniques described below to, for example, evaluate the normal and/or engineered peptide- or protein-expressing cells prior to their introduction into the patient. Such antibodies may additionally be used as a method for inhibiting the abnormal activity of a peptide or protein of interest at least partially encoded by a GTS of the present invention. Thus, such antibodies may, for example, be utilized as part of treatment methods for development and cell differentiation disorders.

[0102] For the production of antibodies, various host animals may be immunized by injection with the peptide or protein of interest, a subunit peptide of such protein, a truncated polypeptide, functional equivalents of the peptide or protein, mutants of the peptide or protein, or denatured forms of the above. Such host animals may include, but are not limited to, rabbits, mice, and rats, to name but a few. Various adjuvants can be used to increase the immunological response, depending on the host species, including but not limited to Freund's (complete and incomplete), mineral gels such as aluminum hydroxide, surface active substances such as lysolecithin, pluronic polyols, polyanions, peptides, oil emulsions, keyhole limpet hemocyanin, dinitrophenol, and potentially useful human adjutants such as BCG (bacille Calmette-Guerin) and Corynebacterium parvum. Polyclonal antibodies are heterogeneous populations of antibody molecules derived from the sera of the immunized animals.

[0103] Monoclonal antibodies, which are homogeneous populations of antibodies to a particular antigen, may be obtained by any technique which provides for the production of antibody molecules by continuous cell lines in culture. These include, but are not limited to, the hybridoma technique of Kohler and Milstein, (1975, Nature 256:495-497; and U.S. Pat. No. 4,376,110), the human B-cell hybridoma technique (Kosbor et al., 1983, Immunology Today 4:72; Cole et al., 1983, Proc. Natl. Acad. Sci. USA 80:2026-2030), and the EBV-hybridoma technique (Cole et al., 1985, Monoclonal Antibodies And Cancer Therapy, Alan R. Liss, Inc., pp. 77-96). Such antibodies may be of any immunoglobulin class including IgG, IgM, IgE, IgA, IgD and any subclass thereof. The hybridoma producing the mAb of this invention may be cultivated in vitro or in vivo. Production of high titers of mAbs in vivo makes this the presently preferred method of production.

[0104] In addition, techniques developed for the production of “chimeric antibodies” (Morrison et al., 1984, Proc. Natl. Acad. Sci. USA, 81:6851-6855; Neuberger et al., 1984, Nature, 312:604-608; Takeda et al., 1985, Nature, 314:452-454) by splicing the genes from a mouse antibody molecule of appropriate antigen specificity together with genes from a human antibody molecule of appropriate biological activity can be used. A chimeric antibody is a molecule in which different portions are derived from different animal species, such as those having a variable region derived from a porcine mAb and a human immunoglobulin constant region.

[0105] Alternatively, techniques described for the production of single chain antibodies (U.S. Pat. No. 4,946,778; Bird, 1988, Science 242:423-426; Huston et al., 1988, Proc. Natl. Acad. Sci. USA 85:5879-5883; and Ward et al., 1989, Nature 334:544-546) can be adapted to produce single chain antibodies against gene products of interest. Single chain antibodies are formed by linking the heavy and light chain fragments of the Fv region via an amino acid bridge, resulting in a single chain polypeptide.

[0106] Antibody fragments which recognize specific epitopes may be generated by known techniques. For example, such fragments include, but are not limited to: the F(ab′)₂ fragments which can be produced by pepsin digestion of the antibody molecule and the Fab fragments which can be generated by reducing the disulfide bridges of the F(ab′)₂ fragments. Alternatively, Fab expression libraries may be constructed (Huse et al., 1989, Science, 246:1275-1281) to allow rapid and easy identification of monoclonal Fab fragments with the desired specificity.

[0107] Antibodies to peptides and proteins that are fully or at least partially encoded by the described GTSs, or fragments or truncated versions thereof, can in turn be utilized to generate anti-idiotypic antibodies that “mimic” an epitope of the peptide or protein of interest, using techniques well known to those skilled in the art. (See, e.g., Greenspan & Bona, 1993, FASEB J 7(5):437-444; and Nissinoff, 1991, J. Immunol. 147(8):2429-2438). For example antibodies that bind to a regulatory peptide or protein of interest of the current invention and competitively inhibit the binding of such peptide or protein to any of its binding partners in the cell can be used to generate anti-idiotypes that “mimic” the peptide or protein of interest and, therefore, bind and neutralize the particular binding partner of the peptide or protein of interest. Such neutralizing antibodies, anti-idiotypes, Fab fragments of such antibodies, or humanized derivatives thereof, can be used in therapeutic regimens to mimic or neutralize (depending on the antibody) the effect of a particular peptide of interest, or a binding partner of a peptide or protein of interest.

[0108] 5.5 Diagnosis of Disorders Affecting Development and Cell Differentiation

[0109] A variety of methods can be employed for the diagnostic and prognostic evaluation of disorders involving developmental and differentiation processes, and for the identification of subjects having a predisposition to such disorders.

[0110] Such methods may, for example, utilize reagents such as the nucleotide sequences described above, and antibodies to peptides and proteins of the current invention, as described, in Section 5.4. Specifically, such reagents may be used, for example, for: (1) the detection of the presence of gene mutations, or the detection of either over- or under-expression of the respective mRNAs relative to the non-disorder state; (2) the detection of either an over- or an under-abundance of the respective gene product relative to the non-disorder state; and (3) the detection of perturbations or abnormalities in the intra- and inter-cellular processes mediated by the respective peptides or proteins of the current invention.

[0111] The methods described herein may be performed, for example, by utilizing pre-packaged diagnostic kits comprising at least one specific nucleotide sequence of the current invention or antibody reagent described herein, which may be conveniently used, e.g., in clinical settings, to diagnose patients exhibiting developmental or cell differentiation disorder abnormalities.

[0112] For the detection of mutations in any of the genes described above, any nucleated cell can be used as a starting source for genomic nucleic acid. For the detection of gene expression or gene products, any cell type or tissue in which the gene of interest is expressed, such as, for example, ES cells, may be utilized. Specific examples of cells and tissues that can be analyzed using the claimed polynucleotides include, but are not limited to, endothelial cells, epithelial cells, islets, neurons or neural tissue, mesothelial cells, osteocytes, lymphocytes, chondrocytes, hematopoietic cells, immune cells, cells of the major glands or organs (e.g., lung, heart, stomach, pancreas, kidney, skin, etc.), exocrine and/or endocrine cells, embryonic and other stem cells, fibroblasts, and culture adapted and/or transformed versions of the above. Diseases or natural processes that can also be correlated with the expression of mutant, or normal, variants of the disclosed GTSs include, but are not limited to, aging, cancer, autoimmune disease, lupus, scleroderma, Crohn's disease, multiple sclerosis, inflammatory bowel disease, immune disorders, schizophrenia, psychosis, alopecia, glandular disorders, inflammatory disorders, ataxia telangiectasia, diabetes, skin disorders such as acne, eczema, and the like, osteo and rheumatoid arthritis, high blood pressure, atherosclerosis, cardiovascular disease, pulmonary disease, degenerative diseases of the neural or skeletal systems, Alzheimer's disease, Parkinson's disease, osteoporosis, asthma, developmental disorders or abnormalities, genetic birth defects, infertility, epithelial ulcerations, and viral, parasitic, fungal, yeast, or bacterial infection.

[0113] Primary, secondary, or culture-adapted variants of cancer cells/tissues can also be analyzed using the claimed polynucleotides. Examples of such cancers include, but are not limited to, Cardiac: sarcoma (angiosarcoma, fibrosarcoma, rhabdomyosarcoma, liposarcoma), myxoma, rhabdomyoma, fibroma, lipoma and teratoma; Lung: bronchogenic carcinoma (squamous cell, undifferentiated small cell, undifferentiated large cell, adenocarcinoma), alveolar (bronchiolar) carcinoma, bronchial adenoma, sarcoma, lymphoma, chondromatous hamartoma, mesothelioma; Gastrointestinal: esophagus (squamous cell carcinoma, adenocarcinoma, leiomyosarcoma, lymphoma), stomach (carcinoma, lymphoma, leiomyosarcoma), pancreas (ductal adenocarcinoma, insulinoma, glucagonoma, gastrinoma, carcinoid tumors, vipoma), small bowel (adenocarcinoma, lymphoma, carcinoid tumors, Karposi's sarcoma, leiomyoma, hemangioma, lipoma, neurofibroma, fibroma), large bowel (adenocarcinoma, tubular adenoma, villous adenoma, hamartoma, leiomyoma); Genitourinary tract: kidney (adenocarcinoma, Wilm's tumor [nephroblastoma], lymphoma, leukemia), bladder and urethra (squamous cell carcinoma, transitional cell carcinoma, adenocarcinoma), prostate (adenocarcinoma, sarcoma), testis (seminoma, teratoma, embryonal carcinoma, teratocarcinoma, choriocarcinoma, sarcoma, interstitial cell carcinoma, fibroma, fibroadenoma, adenomatoid tumors, lipoma); Liver: hepatoma (hepatocellular carcinoma), cholangiocarcinoma, hepatoblastoma, angiosarcoma, hepatocellular adenoma, hemangioma; Bone: osteogenic sarcoma (osteosarcoma), fibrosarcoma, malignant fibrous histiocytoma, chondrosarcoma, Ewing's sarcoma, malignant lymphoma (reticulum cell sarcoma), multiple myeloma, malignant giant cell tumor, chordoma, osteochronfroma (osteocartilaginous exostoses), benign chondroma, chondroblastoma, chondromyxofibroma, osteoid osteoma and giant cell tumors; Nervous system: skull (osteoma, hemangioma, granuloma, xanthoma, osteitis deformans), meninges (meningioma, meningiosarcoma, gliomatosis), brain (astrocytoma, medulloblastoma, glioma, ependymoma, germinoma [pinealoma], glioblastoma multiforme, oligodendroglioma, schwannoma, retinoblastoma, congenital tumors), spinal cord (neurofibroma, meningioma, glioma, sarcoma); Gynecological: uterus (endometrial carcinoma), cervix (cervical carcinoma, pre-tumor cervical dysplasia), ovaries (ovarian carcinoma [serous cystadenocarcinoma, mucinous cystadenocarcinoma, endometrioid tumors, celioblastoma, clear cell carcinoma, unclassified carcinoma], granulosa-thecal cell tumors, Sertoli-Leydig cell tumors, dysgerminoma, malignant teratoma), vulva (squamous cell carcinoma, intraepithelial carcinoma, adenocarcinoma, fibrosarcoma, melanoma), vagina (clear cell carcinoma, squamous cell carcinoma, botryoid sarcoma [embryonal rhabdomyosarcoma], fallopian tubes (carcinoma); Hematologic: blood (myeloid leukemia [acute and chronic], acute lymphoblastic leukemia, chronic lymphocytic leukemia, myeloproliferative diseases, multiple myeloma, myelodysplastic syndrome), Hodgkin's disease, non-Hodgkin's lymphoma [malignant lymphoma]; Skin: malignant melanoma, basal cell carcinoma, squamous cell carcinoma, Karposi's sarcoma, moles, dysplastic nevi, lipoma, angioma, dermatofibroma, keloids, psoriasis; Brcast: carcinoma and sarcoma, and Adrenal glands: neuroblastoma.

[0114] Nucleic acid-based detection techniques and peptide detection techniques that can be used to conduct the above analyses are described below.

[0115] 5.5.1. Detection of the Genes of the Current Invention and Their Respective Transcripts

[0116] Mutations within the genes of the current invention can be detected by utilizing a number of techniques. Nucleic acid from any nucleated cell can be used as the starting point for such assay techniques, and may be isolated according to standard nucleic acid preparation procedures which are well known to those of skill in the art.

[0117] DNA may be used in hybridization or amplification assays of biological samples to detect abnormalities involving gene structure, including point mutations, insertions, deletions and chromosomal rearrangements. Such assays may include, but are not limited to, Southern analyses, single stranded conformational polymorphism analyses (SSCP), and PCR analyses.

[0118] Such diagnostic methods for the detection of gene-specific mutations can involve for example, contacting and incubating nucleic acids including recombinant DNA molecules, cloned genes or degenerate variants thereof, obtained from a sample, e.g., derived from a patient sample or other appropriate cellular source, with one or more labeled nucleic acid reagents including recombinant DNA molecules, cloned genes or degenerate variants thereof, as described above, under conditions favorable for the specific annealing of these reagents to their complementary sequences within the gene of interest of the current invention. Preferably, the lengths of these nucleic acid reagents are at least 15 to 30 nucleotides. After incubation, all non-annealed nucleic acids are removed from the nucleic acid molecule hybrid. The presence of nucleic acids which have hybridized, if any such molecules exist, is then detected. Using such a detection scheme, the nucleic acid from the cell type or tissue of interest can be immobilized, for example, to a solid support such as a membrane, or a plastic surface such as that on a microtiter plate or polystyrene beads. In this case, after incubation, non-annealed, labeled nucleic acid reagents of the type described above are easily removed. Detection of the remaining, annealed, labeled nucleic acid reagents is accomplished using standard techniques well-known to those in the art. The gene sequences to which the nucleic acid reagents have annealed can be compared to the annealing pattern expected from a normal gene sequence in order to determine whether a gene mutation is present.

[0119] Alternative diagnostic methods for the detection of gene specific nucleic acid molecules, in patient samples or other appropriate cell sources, may involve their amplification, e.g., by PCR (the experimental embodiment set forth in Mullis, K. B., 1987, U.S. Pat. No. 4,683,202), followed by the detection of the amplified molecules using techniques well known to those of skill in the art. The resulting amplified sequences can be compared to those which would be expected if the nucleic acid being amplified contained only normal copies of the respective gene in order to determine whether a gene mutation exists.

[0120] Additionally, well-known genotyping techniques can be performed to identify individuals carrying mutations in any of the genes of the current invention. Such techniques include, for example, the use of restriction fragment length polymorphisms (RFLPs), which involve sequence variations in one of the recognition sites for the specific restriction enzyme used.

[0121] Furthermore, the polynucleotide sequences of the current invention may be mapped to chromosomes and specific regions of chromosomes using well known genetic and/or chromosomal mapping techniques. These techniques include in situ hybridization, linkage analysis against known chromosomal markers, hybridization screening with libraries or flow-sorted chromosomal preparations specific to known chromosomes, and the like. The technique of fluorescent in situ hybridization of chromosome spreads has been described, for example, in Verma et al. (1988) Human Chromosomes: A Manual of Basic Techniques, Pergamon Press, New York. Fluorescent in situ hybridization of chromosomal preparations and other physical chromosome mapping techniques may be correlated with additional genetic map data. Examples of genetic map data can be found, for example, in Genetic Maps: Locus Maps of Complex Genomes, Book 5: Human Maps, O'Brien, editor, Cold Spring Harbor Laboratory Press (1990). Comparisons of physical chromosomal map data may be of particular interest in detecting genetic diseases in carrier states.

[0122] The level of expression of genes can also be assayed by detecting and measuring the transcription of such genes. For example, RNA from a cell type or tissue known, or suspected to express any of the genes of the current invention can be isolated and tested utilizing hybridization or PCR techniques (e.g., northern or RT PCR) such as those described, above. Such analyses may reveal both quantitative and qualitative aspects of the expression pattern of the respective gene, including activation or inactivation of gene expression. In situ hybridization using suitable radioactive labels, enzymatic labels, or chemically tagged forms of the described polynucleotide sequences can also be used to assess expression patterns in vivo.

[0123] Additionally, an oligonucleotide or polynucleotide sequence first disclosed in at least a portion of one of the GTS sequences of SEQ ID NOS:9-1008 can be used as a hybridization probe in conjunction with a solid support matrix/substrate (resins, beads, membranes, plastics, polymers, metal or metallized substrates, crystalline or polycrystalline substrates, etc.). Of particular note are spatially addressable arrays (i e., gene chips, microtiter plates, etc.) of oligonucleotides and polynucleotides, or corresponding oligopeptides and polypeptides, wherein at least one of the biopolymers present on the spatially addressable array comprises an oligonucleotide or polynucleotide sequence first disclosed in at least one of the GTS sequences of SEQ ID NOS:9-1008, or an amino acid sequence encoded thereby. Methods for attaching biopolymers to, or synthesizing biopolymers on, solid support matrices, and conducting binding studies thereon are disclosed in, inter alia, U.S. Pat. Nos. 5,556,752, 5,744,305, 4,631,211, 5,445,934, 5,252,743, 4,713,326, 5,424,186, and 4,689,405 the disclosures of which are herein incorporated by reference in their entirety.

[0124] Oligonucleotides corresponding to the described GTSs can be used as hybridization probes either singly or in chip format. For example, a series of such GTS oligonucleotide sequences, or the complements thereof, can be used to represent all or a portion of the described GTS sequences. The oligonucleotides, typically between about 16 to about 40 (or any whole number within the stated range) nucleotides in length, may partially overlap each other and/or the NHP sequence may be represented using oligonucleotides that do not overlap. Accordingly, the described NHP polynucleotide sequences shall typically comprise at least about two or three distinct oligonucleotide sequences of at least about 18, and preferably about 25, nucleotides in length that are first disclosed in the described Sequence Listing. Such oligonucleotide sequences may begin at any nucleotide present within a sequence in the Sequence Listing and proceed in either a sense (5′-to-3′) orientation vis-a-vis the described sequence or in an antisense orientation.

[0125] Although the presently described GTSs have been specifically described using nucleotide sequence, it should be appreciated that each of the GTSs can uniquely be described using any of a wide variety of additional structural attributes, or combinations thereof. For example, a given GTS can be described by the net composition of the nucleotides present within a given region of the GTS in conjunction with the presence of one or more specific oligonucleotide sequence(s) first disclosed in the GTS. Alternatively, a restriction map specifying the relative positions of restriction endonuclease digestion sites, or various palindromic or other specific oligonucleotide sequences can be used to structurally describe a given GTS. Such restriction maps, which are typically generated by widely available computer programs (e.g., the University of Wisconsin GCG sequence analysis package, SEQUENCHER 3.0, Gene Codes Corp., Ann Arbor, Mich., etc.), can optionally be used in conjunction with one or more discrete nucleotide sequence(s) present in the GTS that can be described by the relative position of the sequence relative to one or more additional sequence(s) or one or more restriction sites present in the GTS.

[0126] 5.5.2 Detection of the Gene Products of the Current Invention

[0127] Antibodies directed against wild type or mutant gene products of the current invention or conserved variants or peptide fragments thereof, which are discussed above in Section 5.4 may also be used as diagnostics and prognostics for disorders affecting development and cellular differentiation, as described herein. Such diagnostic methods, may be used to detect abnormalities in the level of gene expression, or abnormalities in the structure and/or temporal, tissue, cellular, or subcellular location of the respective gene product, and may be performed in vivo or in vitro, such as, for example, on biopsy tissue.

[0128] The tissue or cell type to be analyzed will generally include those which are known, or suspected, to contain cells that express the respective gene. The protein isolation methods employed herein may, for example, be such as those described in Harlow and Lane (Harlow, E. and Lane, D., 1988, “Antibodies: A Laboratory Manual”, Cold Spring Harbor Laboratory Press, Cold Spring Harbor, N.Y.), which is incorporated herein by reference in its entirety. The isolated cells can be derived from cell culture or from a patient. The analysis of cells taken from culture may be a necessary step in the assessment of cells that could be used as part of a cell-based gene therapy technique or, alternatively, to test the effect of compounds on the expression of the respective gene.

[0129] For example, antibodies, or fragments of antibodies, such as those described above in Section 5.4 are also useful in the present invention to quantitatively or qualitatively detect the presence of gene products of the current invention or conserved variants or peptide fragments thereof. This can be accomplished, for example, by immunofluorescence techniques employing a fluorescently labeled antibody (see below, this Section) coupled with light microscopic, flow cytometric, or fluorimetric detection.

[0130] The antibodies (or fragments thereof) or fusion or conjugated proteins useful in the present invention may, additionally, be employed histologically, as in immunofluorescence, immunoelectron microscopy or non-immuno assays, for in situ detection of gene products of the current invention or conserved variants or peptide fragments thereof, or for catalytic subunit binding (in the case of labeled catalytic subunit fusion protein).

[0131] In situ detection may be accomplished by removing a histological specimen from a patient, and applying thereto a labeled antibody or fusion protein of the present invention. The antibody (or fragment) or fusion protein is preferably applied by overlaying the labeled antibody (or fragment) onto a biological sample. Through the use of such a procedure, it is possible to determine not only the presence of the gene product of the current invention, or conserved variants or peptide fragments, but also its distribution in the examined tissue. Using the present invention, those of ordinary skill will readily perceive that any of a wide variety of histological methods (such as staining procedures) can be modified in order to achieve such in situ detection.

[0132] Immunoassays and non-immunoassays for gene products of the current invention or conserved variants or peptide fragments thereof will typically comprise incubating a sample, such as a biological fluid, a tissue extract, freshly harvested cells, or lysates of cells which have been incubated in cell culture, in the presence of a detectably labeled antibody capable of identifying the respective gene products of interest or conserved variants or peptide fragments thereof, and detecting the bound antibody by any of a number of techniques well-known in the art.

[0133] The biological sample may be brought in contact with and immobilized onto a solid phase support or carrier such as nitrocellulose, or other solid support which is capable of immobilizing cells, cell particles or soluble proteins. The support may then be washed with suitable buffers followed by treatment with the detectably labeled antibody specific to the peptide or protein of interest of the current invention or with fusion protein. The solid phase support may then be washed with the buffer a second time to remove unbound antibody or fusion protein. The amount of bound label on solid support may then be detected by conventional means.

[0134] “Solid phase support or carrier” is intended to encompass any support capable of binding an antigen or an antibody. Well-known supports or carriers include glass, polystyrene, polypropylene, polyethylene, dextran, nylon, amylases, natural and modified celluloses, polyacrylamides, gabbros, and magnetite. The nature of the carrier can be either soluble to some extent or insoluble for the purposes of the present invention. The support material may have virtually any possible structural configuration so long as the coupled molecule is capable of binding to an antigen or antibody. Thus, the support configuration may be spherical, as in a bead, or cylindrical, as in the inside surface of a test tube, or the external surface of a rod. Alternatively, the surface may be flat such as a sheet, test strip, etc. Preferred supports include polystyrene beads. Those skilled in the art will know many other suitable carriers for binding antibody or antigen, or will be able to ascertain the same by use of routine experimentation.

[0135] The binding activity of a given lot of antibody or fusion protein may be determined according to well known methods. Those skilled in the art will be able to determine operative and optimal assay conditions for each determination by employing routine experimentation.

[0136] With respect to antibodies, one of the ways in which the antibody can be detectably labeled is by linking the same to an enzyme and use in an enzyme immunoassay (EIA) (Voller, “The Enzyme Linked Immunosorbent Assay (ELISA)”, 1978, Diagnostic Horizons 2:1-7, Microbiological Associates Quarterly Publication, Walkersville, Md.); Voller et al., 1978, J. Clin. Pathol. 31:507-520; Butler, 1981, Meth. Enzymol. 73:482-523; Maggio (ed.), 1980, Enzyme Immunoassay, CRC Press, Boca Raton, Fla.,; Ishikawa et al., (eds.), 1981, Enzyme Immunoassay, Kgaku Shoin, Tokyo). The enzyme which is bound to the antibody will react with an appropriate substrate, preferably a chromogenic substrate, in such a manner as to produce a chemical moiety which can be detected, for example, by spectrophotometric, fluorimetric or by visual means. Enzymes which can be used to detectably label the antibody include, but are not limited to, malate dehydrogenase, staphylococcal nuclease, delta-5-steroid isomerase, yeast alcohol dehydrogenase, alpha-glycerophosphate, dehydrogenase, triose phosphate isomerase, horseradish peroxidase, alkaline phosphatase, asparaginase, glucose oxidase, beta-galactosidase, ribonuclease, urease, catalase, glucose-6-phosphate dehydrogenase, glucoamylase and acetylcholinesterase. The detection can be accomplished by colorimetric methods which employ a chromogenic substrate for the enzyme. Detection may also be accomplished by visual comparison of the extent of enzymatic reaction of a substrate in comparison with similarly prepared standards.

[0137] Detection may also be accomplished using any of a variety of other immunoassays. For example, by radioactively labeling the antibodies or antibody fragments, it is possible to detect the peptide or protein of interest through the use of a radioimmunoassay (RIA) (see, for example, Weintraub, B., Principles of Radioimmunoassays, Seventh Training Course on Radioligand Assay Techniques, The Endocrine Society, March, 1986, which is incorporated by reference herein). The radioactive isotope can be detected by such means as the use of a gamma counter or a scintillation counter or by autoradiography.

[0138] It is also possible to label the antibody with a fluorescent compound. When the fluorescently labeled antibody is exposed to light of the proper wave length, its presence can then be detected due to fluorescence. Among the most commonly used fluorescent labeling compounds are fluorescein isothiocyanate, rhodamine, phycoerythrin, phycocyanin, allophycocyanin and fluorescamine.

[0139] The antibody can also be detectably labeled using fluorescence emitting metals such as ¹⁵²Eu, or others of the lanthanide series. These metals can be attached to the antibody using such metal chelating groups as diethylenetriaminepentacetic acid (DTPA) or ethylenediaminetetraacetic acid (EDTA).

[0140] The antibody also can be detectably labeled by coupling it to a chemiluminescent compound. The presence of the chemiluminescent-tagged antibody is then determined by detecting the presence of luminescence that arises during the course of a chemical reaction. Examples of particularly useful chemiluminescent labeling compounds are luminol, isoluminol, theromatic acridinium ester, imidazole, acridinium salt and oxalate ester.

[0141] Likewise, a bioluminescent compound may be used to label the antibody of the present invention. Bioluminescence is a type of chemiluminescence found in biological systems in, which a catalytic protein increases the efficiency of the chemiluminescent reaction. The presence of a bioluminescent protein is determined by detecting the presence of luminescence. Important bioluminescent compounds for labeling purposes include, but are not limited to, luciferin, luciferase and aequorin.

[0142] An additional use of a peptide or polypeptide encoded by an oligonucleotide or polynucleotide sequence first disclosed in at least one of the GTS sequences of SEQ ID NOS:9-1008 is by incorporating the sequence into a phage display, or other peptide library/binding, system that can be used to screen for proteins, or other ligands, that are capable of binding to an amino acid sequence encoded by an oligonucleotide or polynucleotide sequence first disclosed in at least one of the GTS sequences of SEQ ID NOS:9-1008 (see U.S. Pat. Nos. 5,270,170, and 5,432,018, herein incorporated by reference in their entirety). Moreover, peptide arrays comprising a novel amino acid sequence corresponding to a portion of at least one of the polynucleotide sequences first disclosed in SEQ ID NOS:9-1008 can be generated and screened essentially as described in U.S. Pat. Nos. 5,143,854, 5,405,783, and 5,252,743, the complete disclosures of which are herein incorporated by references.

[0143] Additionally, the presently described GTSs, or primers derived therefrom, can be used to screen spatially addressable arrays, or pools therefrom, of clones present in a full-length human cDNA library. The 96 well microtiter plate format is especially well-suited to the screening, by PCR for example, of pooled subfractions of cDNA clones.

[0144] 5.6 Screening Assays for Compounds that Modulate the Expression or Activity of Peptides and Proteins of the Current Invention

[0145] The following assays are designed to identify compounds that interact with (e.g., bind to) peptides and proteins at least partially encoded by one of SEQ ID NOS:9-1008 (i.e. peptides or proteins of the current invention) compounds that interact with (e.g., bind to) intracellular proteins that interact with peptides and proteins of the current invention, compounds that interfere with the interaction of peptides and proteins of the current invention with each other and with other intracellular proteins involved in developmental and cell differentiation processes, and to compounds which modulate the activity of genes of the current invention (i.e., modulate the level of expression of genes of the current invention) or modulate the level of gene products of the current invention. Assays may additionally be utilized which identify compounds which bind to gene regulatory sequences (e.g., promoter sequences) and which may modulate the expression of genes of the current invention. See e.g., Platt, K. A., 1994, J. Biol. Chem. 269:28558-28562, which is incorporated herein by reference in its entirety.

[0146] Compounds that can be screened in accordance with the invention include, but are not limited to, peptides, antibodies and fragments thereof, prostaglandins, lipids and other organic compounds (e.g., terpines, peptidomimetics) that bind to the peptide or protein of interest of the current invention and either mimic the activity triggered by the natural ligand (i.e., agonists) or inhibit the activity triggered by the natural ligand (i.e., antagonists); as well as peptides, antibodies or fragments thereof, and other organic compounds that mimic the peptide or protein of interest of the current invention (or a portion thereof) and bind to and “neutralize” natural ligand.

[0147] Such compounds may include, but are not limited to, peptides such as, for example, soluble peptides, including but not limited to members of random peptide libraries (see, e.g., Lam, K. S. et al., 1991, Nature 354:82-84; Houghten, R. et al., 1991, Nature 354:84-86), and combinatorial chemistry-derived molecular library peptides made of D- and/or L-configuration amino acids, phosphopeptides (including, but not limited to, members of random or partially degenerate, directed phosphopeptide libraries; see, e.g., Songyang, Z. et al., 1993, Cell 72:767-778); antibodies (including, but not limited to, polyclonal, monoclonal, humanized, anti-idiotypic, chimeric or single chain antibodies, and Fab, F(ab′)₂ and Fab expression library fragments, and epitope-binding fragments thereof); and small organic or inorganic molecules.

[0148] Other compounds that can be screened in accordance with the invention include, but are not limited to, small organic molecules that are able to gain entry into an appropriate cell (e.g., in ES cells) and affect the expression of a gene of the current invention or some other gene involved in development and cell differentiation (e.g. by interacting with the regulatory region or transcription factors involved in gene expression); or such compounds that affect the activity of the peptide or protein of interest of the current invention, e.g., by inhibiting or enhancing the binding of such peptide or protein to another cellular peptide or protein, or other factor, necessary for catalysis, signal transduction, or the like, that is involved in developmental or cell differentiation processes.

[0149] Computer modeling and searching technologies permit the identification of compounds, or the improvement of already identified compounds, that can modulate the expression or activity of peptides or proteins of interest of the current invention. Having identified such a compound or composition, the active sites or regions are identified. Such active sites might typically be the binding partner sites, such as, for example, the interaction domains of the peptides and proteins of the current invention with their respective binding partners. The active site can be identified using methods known in the art including, for example, from study of the amino acid sequences of peptides, from the nucleotide sequences of nucleic acids, or from study of complexes of the relevant compound or composition with its natural ligand. In the latter case, chemical or X-ray crystallographic methods can be used to find the active site by finding where on the factor the complexed ligand is found.

[0150] Next, the three dimensional geometric structure of the active site is determined. This can be done by known methods, including X-ray crystallography, which can determine a complete molecular structure. On the other hand, solid or liquid phase NMR can be used to determine certain intra-molecular distances. Any other experimental method of structure determination can be used to obtain partial or complete geometric structures. The geometric structures may be measured with a complexed ligand, natural or artificial, which may increase the accuracy of the active site structure determined.

[0151] If an incomplete or insufficiently accurate structure is determined, the methods of computer based numerical modeling can be used to complete the structure or improve its accuracy. Any recognized modeling method may be used, including parameterized models specific to particular biopolymers such as proteins or nucleic acids, molecular dynamics models based on computing molecular motions, statistical mechanics models based on thermal ensembles, or combined models. For most types of models, standard molecular force fields, representing the forces between constituent atoms and groups, are necessary, and can be selected from force fields known in physical chemistry. The incomplete or less accurate experimental structures can serve as constraints on the complete and more accurate structures computed by these modeling methods.

[0152] Finally, having determined the structure of the active site, either experimentally, by modeling, or by a combination, candidate modulating compounds can be identified by searching databases containing compounds along with information on their molecular structure. Such a search seeks compounds having structures that match the determined active site structure and that interact with the groups defining the active site. Such a search can be manual, but is preferably computer assisted. These compounds found from this search are potential modulating compounds of the peptides and proteins of interest of the current invention.

[0153] Alternatively, these methods can be used to identify improved modulating compounds from an already known modulating compound or ligand. The composition of the known compound can be modified and the structural effects of modification can be determined using the experimental and computer modeling methods described above applied to the new composition. The altered structure is then compared to the active site structure of the compound to determine if an improved fit or interaction results. In this manner, systematic variations in composition, such as by varying side groups, can be quickly evaluated to obtain modified modulating compounds or ligands of improved specificity or activity.

[0154] Further experimental and computer modeling methods useful to identify modulating compounds based upon identification of the active sites of peptides and proteins of interest of the current invention, and related factors involved in development, cellular differentiation, and other cellular processes will be apparent to those of skill in the art.

[0155] Examples of molecular modeling systems are the CHARM and QUANTA programs (Polygon Corporation, Waltham, Mass.). CHARM performs the energy minimization and molecular dynamics functions. QUANTA performs the construction, graphic modeling and analysis of molecular structure. QUANTA allows interactive construction, modification, visualization, and analysis of the behavior of molecules with each other.

[0156] A number of articles review computer modeling of drugs interactive with specific proteins, such as Rotivinen et al., 1988, Acta Pharmaceutical Fennica 97:159-166; Ripka, New Scientist 54-57 (Jun. 16, 1988); McKinaly and Rossmann, 1989, Annu. Rev. Pharmacol. Toxicol. 29:111- 122; Perry and Davies, OSAR: Quantitative Structure-Activity Relationships in Drug Design pp. 189-193 (Alan R. Liss, Inc. 1989); Lewis and Dean, 1989, Proc. R. Soc. Lond. 236:125-140 and 141-162; and, with respect to a model receptor for nucleic acid components, Askew et al., 1989, J. Am. Chem. Soc. 111: 1082-1090. Other computer programs that screen and graphically depict chemicals are available from companies such as BioDesign, Inc. (Pasadena, Calif.), Allelix, Inc. (Mississauga, Ontario, Canada), and Hypercube, Inc. (Cambridge, Ontario). Although these are primarily designed for application to drugs specific to particular proteins, they can be adapted to the design of drugs specific to regions of DNA or RNA, once that region is identified.

[0157] Although described above with reference to design and generation of compounds which could alter binding, one could also screen libraries of known compounds, including natural products or synthetic chemicals, and biologically active materials, including proteins, for compounds which are inhibitors or activators.

[0158] Compounds identified via assays such as those described herein may be useful, for example, in elaborating the biological function of the gene products of interest of the current invention and for ameliorating disorders affecting development and cell differentiation. Assays for testing the effectiveness of compounds, identified by, for example, techniques such as those described below.

[0159] 5.6.1. In Vitro Screening Assays for Compounds that Bind to Peptides and Proteins of the Current Invention

[0160] In vitro systems may be designed to identify compounds capable of interacting with (e.g., binding to) peptides and proteins of interest of the current invention, fragments thereof, and variants thereof. The identified compounds can be useful, for example, in modulating the activity of wild type and/or mutant gene products of the current invention; may be utilized in screens for identifying compounds that disrupt normal interactions of the peptides and proteins of the current invention with other factors, like, for example, other peptides and proteins; or may in themselves disrupt such interactions.

[0161] The principle of the assays used to identify compounds that bind to the peptides and proteins of the current invention involves preparing a reaction mixture of the peptides and proteins of interest that are disclosed by the current invention and a test compound under conditions and for a time sufficient to allow the two components to interact and bind, thus forming a complex that can be removed from and/or detected in the reaction mixture. The peptides and proteins of the current invention used can vary depending upon the goal of the screening assay. For example, where agonists of the natural ligand are sought, the full length peptide or protein of interest, or a fusion protein containing the subunit of interest fused to a protein or polypeptide that affords advantages in the assay system (e.g., labeling, isolation of the resulting complex, etc.) can be utilized.

[0162] The screening assays can be conducted in a variety of ways. For example, one method of conducting such an assay involves anchoring the peptide or protein of interest, or a fragment or fusion protein thereof, or the test substance onto a solid phase and detecting peptide or protein of interest/test compound complexes anchored on the solid phase at the end of the reaction. In one embodiment of such a method, the peptide or protein of interest may be anchored onto a solid surface, and the test compound, which is not anchored, may be labeled, either directly or indirectly. In another embodiment of the method, a peptide or protein of interest of the current invention anchored on the solid phase is complexed with a natural ligand of such peptide or protein of interest. Then, a test compound could be assayed for its ability to disrupt the association of the complex.

[0163] In practice, microtiter plates may conveniently be utilized as the solid phase. The anchored component may be immobilized by non-covalent or covalent attachments. Non-covalent attachment may be accomplished by simply coating the solid surface with a solution of the protein and drying. Alternatively, an immobilized antibody, preferably a monoclonal antibody, specific for the peptide or protein to be immobilized may be used to anchor the peptide or protein to the solid surface. The surfaces may be prepared in advance and stored.

[0164] In order to conduct the assay, the nonimmobilized component is added to the coated surface containing the anchored component. After the reaction is complete, unreacted components are removed (e.g., by washing) under conditions such that any complexes formed will remain immobilized on the solid surface. The detection of complexes anchored on the solid surface can be accomplished in a number of ways. Where the previously nonimmobilized component is pre-labeled, the detection of label immobilized on the surface indicates that complexes were formed. Where the previously nonimmobilized component is not pre-labeled, an indirect label can be used to detect complexes anchored on the surface; e.g., using a labeled antibody specific for the previously nonimmobilized component (the antibody, in turn, may be directly labeled or indirectly labeled with a labeled anti-Ig antibody).

[0165] Alternatively, a reaction can be conducted in a liquid phase, the reaction products separated from unreacted components, and complexes detected; e.g., using an immobilized antibody specific for one component of complexes formed, like, for example, the peptide or protein of interest of the current invention or the test compound to anchor any complexes formed in solution, and a labeled antibody specific for the other component of the possible complex to detect anchored complexes.

[0166] 5.6.2 Assays for Intracellular Proteins that Interact with the Peptides and Proteins of the Current Invention

[0167] Any method suitable for detecting protein-protein interactions may be employed for identifying intracellular peptides and proteins that interact with peptides and proteins of the current invention. Among the traditional methods which may be employed are co-immunoprecipitation, crosslinking and co-purification through gradients or chromatographic columns of cell lysates or proteins obtained from cell lysates and the peptides and proteins of the current invention to identify proteins in the lysate that interact with those peptides and proteins of the current invention. For these assays, the peptides and proteins of the current invention may be used in full length, or in truncated or modified forms or as fusion-proteins. Similarly, the component may be a complex of two or more of the peptides and proteins of the current invention. Once isolated, such an intracellular protein can be identified and can, in turn, be used in conjunction with standard techniques to identify proteins with which it interacts. For example, at least a portion of the amino acid sequence of an intracellular protein which interacts with a peptide or protein of the current invention, can be ascertained using techniques well known to those of skill in the art, such as via the Edman degradation technique. (See, e.g., Creighton, 1983, “Proteins: Structures and Molecular Principles”, W.H. Freeman & Co., N.Y., pp.34-49). The amino acid sequence obtained may be used as a guide for the generation of oligonucleotide mixtures that can be used to screen for gene sequences encoding such intracellular proteins. Screening may be accomplished, for example, by standard hybridization or PCR techniques. Techniques for the generation of oligonucleotide mixtures and the screening are well-known. (See, e.g., Ausubel, supra., and PCR Protocols: A Guide to Methods and Applications, 1990, Innis, M. et al, eds. Academic Press, Inc., New York).

[0168] Additionally, methods may be employed which result in the simultaneous identification of genes which encode the intracellular proteins interacting with peptides and proteins of the current invention. These methods include, for example, probing expression libraries, in a manner similar to the well known technique of antibody probing of ëgt1 1 libraries, using a labeled form of a peptide or protein of the current invention, or a fusion protein, e.g., a peptide or protein at least partially encoded by a GTS of the present invention fused to a marker (e.g., an enzyme, fluor, luminescent protein, or dye), or an Ig-Fc domain.

[0169] One method that detects protein interactions in vivo, the two-hybrid system, is described in detail for illustration only and not by way of limitation. One version of this system has been described (Chien et al., 1991, Proc. Natl. Acad. Sci. USA, 88:9578-9582) and is commercially available from Clontech (Palo Alto, Calif.).

[0170] Briefly, utilizing such a system, plasmids are constructed that encode two hybrid proteins: one plasmid consists of nucleotides encoding the DNA-binding domain of a transcription activator protein fused to a nucleotide sequence of the current invention encoding a peptide or protein of the current invention, a modified or truncated form or a fusion protein, and the other plasmid consists of nucleotides encoding the transcription activator protein's activation domain fused to a cDNA encoding an unknown protein which has been recombined into this plasmid as part of a cDNA library. The DNA-binding domain fusion plasmid and the cDNA library are transformed into a strain of the yeast Saccharomyces cerevisiae that contains a reporter gene (e.g., HBS or lacZ) whose regulatory region contains the transcription activator's binding site. Either hybrid protein alone cannot activate transcription of the reporter gene; the DNA-binding domain hybrid cannot because it does not provide activation function, and the activation domain hybrid cannot because it cannot localize to the activator's binding sites. Interaction of the two hybrid proteins reconstitutes the functional activator protein and results in expression of the reporter gene, which is detected by an assay for the reporter gene product.

[0171] The two-hybrid system or related methodology may be used to screen activation domain libraries for proteins that interact with the “bait” gene product. By way of example, and not by way of limitation, a peptide or protein of the current invention may be used as the bait gene product. Total genomic or cDNA sequences are fused to the DNA encoding an activation domain. This library and a plasmid encoding a hybrid of a bait gene product of the current invention fused to the DNA-binding domain are cotransformed into a yeast reporter strain, and the resulting transformants are screened for those that express the reporter gene. For example, and not by way of limitation, a bait gene sequence of the current invention can be cloned into a vector such that it is translationally fused to the DNA encoding the DNA-binding domain of the GAL4 protein. These colonies are purified and the library plasmids responsible for reporter gene expression are isolated. DNA sequencing is then used to identify the proteins encoded by the library plasmids.

[0172] A cDNA library of the cell line from which proteins that interact with bait gene product of the current invention are to be detected can be made using methods routinely practiced in the art. According to the particular system described herein, for example, the cDNA fragments can be inserted into a vector such that they are translationally fused to the transcriptional activation domain of GAL4. This library can be co-transfected along with the bait gene-GAL4 fusion plasmid into a yeast strain which contains a lacZ gene driven by a promoter which contains GAL4 activation sequence. A cDNA encoded protein, fused to GAL4 transcriptional activation domain, that interacts with bait gene product will reconstitute an active GAL4 protein and thereby drive expression of the HIS3 gene. Colonies which express HIS3 can be detected by their growth on petri dishes containing semi-solid agar based media lacking histidine. The cDNA can then be purified from these strains, and used to produce and isolate the bait gene-interacting protein using techniques routinely practiced in the art.

[0173] 5.6.3 Assays for Compounds that Interfere with Interactions of the Peptides and Proteins of the Current Invention with Intracellular Macromolecules

[0174] The macromolecules that interact with the peptides and proteins of the current invention are referred to, for purposes of this discussion, as “binding partners”. These binding partners are likely to be involved in catalytic reactions or signal transduction pathways, and therefore, in the role of the peptides and proteins of the current invention in development and cell differentiation. It is also desirable to identify compounds that interfere with or disrupt the interaction of such binding partners with the peptides and proteins of the current invention which may be useful in regulating the activity of the peptides and proteins of the current invention and thus control development and cell differentiation disorders associated with the activity of the peptides and proteins of the current invention.

[0175] The basic principle of the assay systems used to identify compounds that interfere with the interaction between the peptides and proteins of the current invention and its binding partner or partners involves preparing a reaction mixture containing the peptides or proteins of the current invention of interest, modified or truncated version thereof, or fusion proteins thereof as described above, and the binding partner under conditions and for a time sufficient to allow the two to interact and bind, thus forming a complex. In order to test a compound for inhibitory activity, the reaction mixture is prepared in the presence and absence of the test compound. The test compound may be initially included in the reaction mixture, or may be added at a time subsequent to the addition of the peptide or protein of the current invention and its binding partner. Control reaction mixtures are incubated without the test compound or with a placebo. The formation of any complexes between the peptide or protein of the current invention and the binding partner is then detected. The formation of a complex in the control reaction, but not in the reaction mixture containing the test compound, indicates that the compound interferes with the interaction of the peptide or protein at least partially encoded by a GTS of the present invention and the interactive binding partner. Additionally, complex formation within reaction mixtures containing the test compound and normal peptide or protein of the current invention may also be compared to complex formation within reaction mixtures containing the test compound and a mutant peptide or protein of the current invention. This comparison can be important in those cases wherein it is desirable to identify compounds that disrupt interactions of mutant but not normal forms of a peptide or protein of the current invention.

[0176] The assay for compounds that interfere with the interaction of a peptide or protein of the current invention and binding partners can be conducted in a heterogeneous or homogeneous format. Heterogeneous assays involve anchoring either the peptide or protein of the current invention or the binding partner onto a solid phase and detecting complexes anchored on the solid phase at the end of the reaction. In homogeneous assays, the entire reaction is carried out in a liquid phase. In either approach, the order of addition of reactants can be varied to obtain different information about the compounds being tested. For example, test compounds that interfere with the interaction by competition can be identified by conducting the reaction in the presence of the test substance; i.e., by adding the test substance to the reaction mixture prior to or simultaneously with the peptide or protein of the current invention and interactive binding partner. Alternatively, test compounds that disrupt preformed complexes, e.g compounds with higher binding constants that displace one of the components from the complex, can be tested by adding the test compound to the reaction mixture after complexes have been formed. The various formats are described briefly below.

[0177] In a heterogeneous assay system, either the peptide or protein of the current invention or the interactive binding partner, is anchored onto a solid surface, while the non-anchored species is labeled either directly or indirectly. In practice, microtiter plates are conveniently utilized. The anchored species may be immobilized by non-covalent or covalent attachments. Non-covalent attachment may be accomplished simply by coating the solid surface with a solution of the peptide or protein of the current invention or binding partner and drying. Alternatively, an immobilized antibody specific for the species to be anchored may be used to anchor the species to the solid surface. The surfaces may be prepared in advance and stored.

[0178] In order to conduct the assay, the partner of the immobilized species is exposed to the coated surface with or without the test compound. After the reaction is complete, unreacted components are removed (e.g., by washing) and any complexes formed will remain immobilized on the solid surface. The detection of complexes anchored on the solid surface can be accomplished in a number of ways. Where the non-immobilized species is pre-labeled, the detection of label immobilized on the surface indicates that complexes were formed. Where the non-immobilized species is not pre-labeled, an indirect label can be used to detect complexes anchored on the surface; e.g., using a labeled antibody specific for the initially non-immobilized species (the antibody, in turn, may be directly labeled or indirectly labeled with a labeled anti-Ig antibody). Depending upon the order of addition of reaction components, test compounds which inhibit complex formation or which disrupt preformed complexes can be detected.

[0179] Alternatively, the reaction can be conducted in a liquid phase in the presence or absence of the test compound, the reaction products separated from unreacted components, and complexes detected; e.g., using an immobilized antibody specific for one of the binding components to anchor any complexes formed in solution, and a labeled antibody specific for the other partner to detect anchored complexes. Again, depending upon the order of addition of reactants to the liquid phase, test compounds which inhibit complex or which disrupt preformed complexes can be identified.

[0180] In an alternate embodiment of the invention, a homogeneous assay can be used. In this approach, a preformed complex of the peptide or protein of the current invention and the interactive binding partner is prepared in which either the peptide or protein of the current invention or its binding partner is labeled, but the signal generated by the label is quenched due to formation of the complex (see, e.g., U.S. Pat. No. 4,109,496 by Rubenstein which utilizes this approach for immunoassays). The addition of a test substance that competes with and displaces one of the species from the preformed complex will result in the generation of a signal above background. In this way, test substances which disrupt peptide or protein of the current invention/intracellular binding partner interaction can be identified.

[0181] In a particular embodiment, a peptide or protein of the current invention can be prepared for immobilization. For example, the peptide or protein of the current invention or a fragment thereof can be fused to a glutathione-S-transferase (GST) gene using a fusion vector, such as pGEX-5X-1, in such a manner that its binding activity is maintained in the resulting fusion protein. The interactive binding partner can be purified and used to raise a monoclonal antibody, using methods routinely practiced in the art and described above. This antibody can be labeled with the radioactive isotope ¹²⁵I, for example, by methods routinely practiced in the art. In a heterogeneous assay, e.g., the GST-peptide or protein of the current invention fusion protein can be anchored to glutathione-agarose beads. The interactive binding partner can then be added in the presence or absence of the test compound in a manner that allows interaction and binding to occur. At the end of the reaction period, unbound material can be washed away, and the labeled monoclonal antibody can be added to the system and allowed to bind to the complexed components. The interaction between the peptide or protein of the current invention and the interactive binding partner can be detected by measuring the amount of radioactivity that remains associated with the glutathione-agarose beads. A successful inhibition of the interaction by the test compound will result in a decrease in measured radioactivity.

[0182] Alternatively, the GST-peptide or protein of the current invention fusion protein and the interactive binding partner can be mixed together in liquid in the absence of the solid glutathione-agarose beads. The test compound can be added either during or after the species are allowed to interact. This mixture can then be added to the glutathione-agarose beads and unbound material is washed away. Again the extent of inhibition of the peptide or protein of the current invention/binding partner interaction can be detected by adding the labeled antibody and measuring the radioactivity associated with the beads.

[0183] In another embodiment of the invention, these same techniques can be employed using peptide fragments that correspond to the binding domains of a peptide or protein of the current invention and/or the interactive or binding partner (in cases where the binding partner is a protein) in place of one or both of the full length proteins. Any number of methods routinely practiced in the art can be used to identify and isolate the binding sites. These methods include, but are not limited to, mutagenesis of the gene encoding one of the proteins and screening for disruption of binding in a co-immunoprecipitation assay. Compensating mutations in the gene encoding the second species in the complex can then be selected. Sequence analysis of the genes encoding the respective proteins will reveal the mutations that correspond to the region of the protein involved in interactive binding. Alternatively, one protein can be anchored to a solid surface using methods described above, and allowed to interact with and bind to its labeled binding partner, which has been treated with a proteolytic enzyme, such as trypsin. After washing, a short, labeled peptide comprising the binding domain may remain associated with the solid material, which can be isolated and identified by amino acid sequencing. Also, once the gene coding for the intracellular binding partner is obtained, short gene segments can be engineered to express peptide fragments of the protein, which can then be tested for binding activity and purified or synthesized.

[0184] For example, and not by way of limitation, a peptide or protein of the current invention can be anchored to a solid material as described, above, by making a GST-peptide or protein of the current invention fusion protein and allowing it to bind to glutathione agarose beads. The interactive binding partner can be labeled with a radioactive isotope, such as ³⁵S, and cleaved with a proteolytic enzyme such as trypsin. Cleavage products can then be added to the anchored GST-peptide or protein of the current invention fusion protein and allowed to bind. After washing away unbound peptides, labeled bound material, representing the intracellular binding partner binding domain, can be eluted, purified, and analyzed for amino acid sequence by well-known methods. Peptides so identified can be produced synthetically or fused to appropriate facilitative proteins using recombinant DNA technology.

[0185] 5.6.4 Assays for Identification of Compounds that Ameliorate Disorders Affecting Development and Cell Differentiation

[0186] Compounds including, but not limited to, binding compounds identified via assay techniques such as those described above, can be tested for the ability to ameliorate development and cell differentiation disorder symptoms. The assays described above can identify compounds which affect the activity of peptides and proteins of the current invention (e.g., compounds that bind to the peptides and proteins of the current invention, inhibit binding of their natural ligands, and compounds that bind to a natural ligand of the peptides and proteins of the current invention and neutralize the ligand activity); or compounds that affect the activity of genes encoding peptides and proteins of the current invention (by affecting the expression of those genes, including molecules, e.g., proteins or small organic molecules, that affect or interfere with splicing events so that expression of the genes of interest can be modulated). However, it should be noted that the assays described herein can also identify compounds that modulate signal transduction or catalytic events that the peptides and proteins of the current invention are involved in. The identification and use of such compounds which affect a step in, for example, signal transduction pathways or catalytic events in which any of the peptides and proteins of the current invention are involved in, may modulate the effect of the peptides and proteins of the current invention on developmental or cell differentiation disorders. Such identification and use of such compounds are within the scope of the invention. Such compounds can be used as part of a therapeutic method for the treatment of developmental and cell differentiation disorders.

[0187] The invention encompasses cell-based and animal model-based assays for the identification of compounds exhibiting such an ability to ameliorate developmental and cell differentiation disorder symptoms. Such cell-based assay systems can also be used as the standard to assay for purity and potency of the natural ligand, catalytic subunit, including recombinantly or synthetically produced catalytic subunit and catalytic subunit mutants.

[0188] Cell-based systems can be used to identify compounds which may act to ameliorate developmental or cell differentiation disorder symptoms. Such cell systems can include, for example, recombinant or non-recombinant cells, such as cell lines, which express the gene encoding the peptide or protein of interest of the current invention. For example ES cells, or cell lines derived from ES cells can be used. In addition, expression host cells (e.g., COS cells, CHO cells, fibroblasts, Sf9 cells) genetically engineered to express a functional peptide or protein of the current invention in addition to factors necessary for the peptide or protein of the current invention to fulfil its physiological role of, for example, signal transduction or catalyses, can be used as an end point in the assay.

[0189] In utilizing such cell systems, cells may be exposed to a compound suspected of exhibiting an ability to ameliorate developmental or cell differentiation disorder symptoms, at a sufficient concentration and for a time sufficient to elicit such an amelioration of such disorder symptoms in the exposed cells. After exposure, the cells can be assayed to measure alterations in the expression of the gene encoding the peptide or protein of interest of the current invention, e.g., by assaying cell lysates for the appropriate mRNA transcripts (e.g., by Northern analysis) or for expression of the peptide or protein of interest of the current invention in the cell; compounds which regulate or modulate expression of the gene encoding the peptide or protein of interest of the current invention are valuable candidates as therapeutics. Alternatively, the cells are examined to determine whether one or more developmental or cell differentiation disorder-like cellular phenotypes has been altered to resemble a more normal or more wild type phenotype, or a phenotype more likely to produce a lower incidence or severity of disorder symptoms. Still further, the expression and/or activity of components of pathways or functionally or physiologically connected peptides or proteins of which the peptide or protein of interest of the current invention is a part, can be assayed.

[0190] For example, after exposure of the cells, cell lysates can be assayed for the presence of increased levels of the test compound as compared to lysates derived from unexposed control cells. The ability of a test compound to inhibit production of the assay compound such systems indicates that the test compound inhibits signal transduction initiated by the peptide or protein of interest of the current invention. Finally, a change in cellular morphology of intact cells may be assayed using techniques well known to those of skill in the art.

[0191] In addition, animal-based development or cell differentiation disorder systems, which may include, for example, mice, may be used to identify compounds capable of ameliorating development or cell differentiation disorder-like symptoms. Such animal models may be used as test systems for the identification of drugs, pharmaceuticals, therapies and interventions which may be effective in treating such disorders. For example, animal models may be exposed to a compound, suspected of exhibiting an ability to ameliorate development or cell differentiation disorder symptoms, at a sufficient concentration and for a time sufficient to elicit such an amelioration of development and/or cell differentiation disorder symptoms in the exposed animals. The response of the animals to the exposure may be monitored by assessing the reversal of disorders associated with development and/or cell differentiation disorders. With regard to intervention, any treatments which reverse any aspect of development or cell differentiation disorder-like symptoms should be considered as candidates for human development and/or cell differentiation disorder therapeutic intervention. Dosages of test agents may be determined by deriving dose-response curves, as discussed below.

[0192] 5.7 The Treatment of Disorders Associated with Stimulation of Peptides and Proteins of the Current Invention

[0193] The invention also encompasses methods and compositions for modifying development and cell differentiation and treating development and cell differentiation disorders. For example, one may decrease the level of expression of one or more genes of the current invention, and/or downregulate activity of one or more of the peptides or proteins of interest of the current invention. Thereby, the response of cells, like, for example, ES cells, to factors which activate the physiological responses that enhance the pathological processes leading to developmental and cell differentiation disorders may be reduced and the symptoms ameliorated. Conversely, the response of cells, like, for example, ES cells, to physiological stimuli involving any of the peptides or proteins of the current invention and necessary for proper developmental and cell differentiation processes may be augmented by increasing the activity of one or several of the peptides or proteins of interest of the current invention. Different approaches are discussed below.

[0194] 5.7.1 Inhibition of Peptides and Proteins of the Current Invention to Reduce Development and Cell Differentiation Disorders

[0195] Any method which neutralizes the catalytic or signal transduction activity of the peptides and proteins of the current invention or which inhibits expression of the genes encoding peptides and proteins (either transcription or translation) can be used to reduce symptoms associated with developmental and cell differentiation disorders.

[0196] In one embodiment, immuno therapy can be designed to reduce the level of endogenous gene expression for the peptides and proteins of the current invention, e.g., using antisense or ribozyme approaches to inhibit or prevent translation of mRNA transcripts; triple helix approaches to inhibit transcription of the genes; or targeted homologous recombination to inactivate or “knock out” the genes or its endogenous promoter.

[0197] Antisense approaches involve the design of oligonucleotides (either DNA or RNA) that are complementary to mRNA specific for peptides and proteins of interest of the current invention. The antisense oligonucleotides will bind to the complementary mRNA transcripts and prevent translation. Absolute complementarity, although preferred, is not required. A sequence “complementary” to a portion of an RNA, as referred to herein, means a sequence having sufficient complementarity to be able to hybridize with the RNA, forming a stable duplex. In the case of double-stranded antisense nucleic acids, a single strand of the duplex DNA may thus be tested, or triplex formation may be assayed. The ability to hybridize will depend on both the degree of complementarity and the length of the antisense nucleic acid. Generally, the longer the hybridizing nucleic acid, the more base mismatches with an RNA it may contain and still form a stable duplex (or triplex, as the case may be). One skilled in the art can ascertain a tolerable degree of mismatch by use of standard procedures to determine the melting point of the hybridized complex.

[0198] Oligonucleotides that are complementary to the 5′ end of the message, e.g., the 5′ untranslated sequence up to and including the AUG initiation codon, should work most efficiently at inhibiting translation. However, sequences complementary to the 3′ untranslated sequences of mRNAs have recently shown to be effective at inhibiting translation of mRNAs as well. See generally, Wagner, R., 1994, Nature 372:333-335. Thus, oligonucleotides complementary to either the 5′- or 3′-non-translated, non-coding regions of the mRNAs specific for the peptides and proteins of the current invention could be used in an antisense approach to inhibit translation of those endogenous mRNAs. Oligonucleotides complementary to the 5′ untranslated region of the mRNA should include the complement of the AUG start codon. Antisense oligonucleotides complementary to mRNA coding regions are less efficient inhibitors of translation but could be used in accordance with the invention. Whether designed to hybridize to the 5′-, 3′- or coding region of an mRNA, antisense nucleic acids should be at least six nucleotides in length, and are preferably oligonucleotides ranging from 6 to about 50 nucleotides in length. In specific aspects the oligonucleotide is at least 10 nucleotides, at least 17 nucleotides, at least 25 nucleotides or at least 50 nucleotides.

[0199] Regardless of the choice of target sequence, it is preferred that in vitro studies are first performed to quantitate the ability of the antisense oligonucleotide to inhibit gene expression. It is preferred that these studies utilize controls that distinguish between antisense gene inhibition and nonspecific biological effects of oligonucleotides. It is also preferred that these studies compare levels of the target RNA or protein with that of an internal control RNA or protein. Additionally, it is envisioned that results obtained using the antisense oligonucleotide are compared with those obtained using a control oligonucleotide. It is preferred that the control oligonucleotide is of approximately the same length as the test oligonucleotide and that the nucleotide sequence of the oligonucleotide differs from the antisense sequence no more than is necessary to prevent specific hybridization to the target sequence.

[0200] The oligonucleotides can be DNA or RNA or chimeric mixtures or derivatives or modified versions thereof, single-stranded or double-stranded. The oligonucleotide can be modified at the base moiety, sugar moiety, or phosphate backbone, for example, to improve stability of the molecule, hybridization, etc. The oligonucleotide may include other appended groups such as peptides (e.g., for targeting host cell receptors in vivo), or agents facilitating transport across the cell membrane (see, e.g., Letsinger et al., 1989, Proc. Natl. Acad. Sci.

[0201] U.S.A. 86:6553-6556; Lemaitre et al., 1987, Proc. Natl. Acad. Sci. 84:648-652; PCT Publication No. WO88/098 10, published Dec. 15, 1988), or hybridization-triggered cleavage agents. (See, e.g., Krol et al., 1988, BioTechniques 6:958-976) or intercalating agents. (See, e.g., Zon, 1988, Pharm. Res. 5:539-549). To this end, the oligonucleotide may be conjugated to another molecule, e.g., a peptide, hybridization triggered cross-linking agent, transport agent, hybridization-triggered cleavage agent, etc.

[0202] The antisense oligonucleotide may comprise at least one modified base moiety which is selected from the group including, but not limited to, 5-fluorouracil, 5-bromouracil, 5-chlorouracil, 5-iodouracil, hypoxanthine, xantine, 4-acetylcytosine, 5-(carboxyhydroxylmethyl) uracil, 5-carboxymethylaminomethyl-2-thiouridine, 5-carboxymethylaminomethyluracil, dihydrouracil, beta-D-galactosylqueosine, inosine, N6-isopentenyladenine, 1-methylguanine, 1-methylinosine, 2,2-dimethylguanine, 2-methyladenine, 2-methylguanine, 3-methylcytosine, 5-methylcytosine, N6-adenine, 7-methylguanine, 5-methylaminomethyluracil, 5-methoxyaminomethyl-2-thiouracil, beta-D-mannosylqueosine, 5′-methoxycarboxymethyluracil, 5-methoxyuracil, 2-methylthio-N6-isopentenyladenine, uracil-5-oxyacetic acid (v), wybutoxosine, pseudouracil, queosine, 2-thiocytosine, 5-methyl-2-thiouracil, 2-thiouracil, 4-thiouracil, 5-methyluracil, uracil-5-oxyacetic acid methylester, uracil-5-oxyacetic acid (v), 5-methyl-2-thiouracil, 3-(3-amino-3-N-2-carboxypropyl) uracil, (acp3)w, and 2,6-diaminopurine.

[0203] The antisense oligonucleotide may also comprise at least one modified sugar moiety selected from the group including, but not limited to, arabinose, 2-fluoroarabinose, xylulose, and hexose.

[0204] In another embodiment, the antisense oligonucleotide comprises at least one modified phosphate backbone selected from the group consisting of a phosphorothioate, a phosphorodithioate, a phosphoramidothioate, a phosphoramidate, a phosphordiamidate, a methylphosphonate, an alkyl phosphotriester, and a formacetal or analog thereof.

[0205] In yet another embodiment, the antisense oligonucleotide is an alpha-anomeric oligonucleotide. An alpha-anomeric oligonucleotide forms specific double-stranded hybrids with complementary RNA in which, contrary to the usual alpha-units, the strands run parallel to each other (Gautier et al., 1987, Nucl. Acids Res. 15:6625-6641). The oligonucleotide is a 2′-0-methylribonucleotide (Inoue et al., 1987, Nucl. Acids Res. 15:6131-6148), or a chimeric RNA-DNA analogue (Inoue et al., 1987, FEBS Lett. 215:327-330).

[0206] Oligonucleotides of the invention may be synthesized by standard methods known in the art, e.g. by use of an automated DNA synthesizer (such as are commercially available from Biosearch, Applied Biosystems, etc.). As examples, phosphorothioate oligonucleotides may be synthesized by the method of Stein et al., 1988, Nucl. Acids Res. 16:3209. Methylphosphonate oligonucleotides can be prepared by use of controlled pore glass polymer supports (Sarin et al., 1988, Proc. Natl. Acad. Sci. U.S.A. 85:7448-7451).

[0207] While antisense nucleotides complementary to the coding region sequence specific for the peptides and proteins of the current invention could be used, those complementary to the transcribed untranslated region are most preferred.

[0208] The antisense molecules should be delivered to cells which express the peptides and proteins of interest of the current invention in vivo, like, for example, ES cells. A number of methods have been developed for delivering antisense DNA or RNA to cells; e.g., antisense molecules can be injected directly into the tissue or cell derivation site, or modified antisense molecules, designed to target the desired cells (e.g., antisense linked to peptides or antibodies that specifically bind receptors or antigens expressed on the target cell surface) can be administered systemically.

[0209] However, it is often difficult to achieve intracellular concentrations of antisense molecules that are sufficient to suppress translation of endogenous mRNAs. Therefore a preferred approach utilizes a recombinant DNA construct in which the antisense oligonucleotide is placed under the control of a strong pol III or pol II promoter. The use of such a construct to transfect target cells in the patient will result in the transcription of sufficient amounts of single stranded RNAs that will form complementary base pairs with the endogenous transcripts specific for the peptides and proteins of interest of the current invention and thereby prevent translation of the respective mRNAs. For example, a vector can be introduced in vivo such that it is taken up by a cell and directs the transcription of an antisense RNA. Such a vector can remain episomal or become chromosomally integrated, as long as it can be transcribed to produce the desired antisense RNA. Such vectors can be constructed by recombinant DNA technology methods standard in the art. Vectors can be plasmid, viral, or others known in the art, used for replication and expression in mammalian cells. Expression of the sequence encoding the antisense RNA can be by any promoter known in the art to act in mammalian, preferably human cells. Such promoters can be inducible or constitutive. Such promoters include, but are not limited to: the SV40 early promoter region (Bemoist and Chambon, 1981, Nature 290:304-310), the promoter contained in the 3′ long terminal repeat of Rous sarcoma virus (Yamamoto et al., 1980, Cell 22:787-797), the herpes thymidine kinase promoter (Wagner et al., 1981, Proc. Natl. Acad. Sci. U.S.A. 78:1441-1445), the regulatory sequences of the metallothionein gene (Brinster et al., 1982, Nature 296:39-42), etc. Any type of plasmid, cosmid, YAC or viral vector can be used to prepare the recombinant DNA construct which can be introduced directly into the tissue or cell derivation site; e.g., the bone marrow. Alternatively, viral vectors can be used which selectively infect the desired tissue or cell type; (e.g., viruses which infect cells of hematopoietic lineage), in which case administration may be accomplished by another route (e.g., systemically).

[0210] Ribozyme molecules designed to catalytically cleave mRNA transcripts specific for the peptides and proteins of interest of the current invention can also be used to prevent translation of the mRNAs of interest and expression of the peptides and proteins encoded by those mRNAs. (See, e.g., PCT International Publication WO90/11364, published Oct. 4, 1990; Sarver et al., 1990, Science 247:1222-1225). While ribozymes that cleave mRNA at site specific recognition sequences can be used to destroy mRNAs, the use of hammerhead ribozymes is preferred. Hammerhead ribozymes cleave mRNAs at locations dictated by flanking regions that form complementary base pairs with the target mRNA. The sole requirement is that the target mRNA have the following sequence of two bases: 5′-UG-3′. The construction and production of hammerhead ribozymes is well known in the art and is described more fully in Haseloff and Gerlach, 1988, Nature, 334:585-591. Preferably the ribozyme is engineered so that the cleavage recognition site is located near the 5′ end of the mRNA of interest; i.e., to increase efficiency and minimize the intracellular accumulation of non-functional mRNA transcripts.

[0211] The ribozymes of the present invention also include RNA endoribonucleases (hereinafter “Cech-type ribozymes”) such as the one which occurs naturally in Tetrahymena Thermophila (known as the IVS, or L-19 IVS RNA) and which has been extensively described by Thomas Cech and collaborators (Zaug et al., 1984, Science, 224:574-578; Zaug and Cech, 1986, Science, 231:470-475; Zaug et al., 1986, Nature, 324:429-433; published International Patent Application No. WO 88/04300 by University Patents Inc.; Been and Cech, 1986, Cell, 47:207-216). The Cech-type ribozymes have an eight base pair active site which hybridizes to a target RNA sequence where after cleavage of the target RNA takes place. The invention encompasses those Cech-type ribozymes which target eight base-pair active site sequences that are present in the mRNAs specific for the peptides and proteins of interest of the current invention.

[0212] As in the antisense approach, the ribozymes can be composed of modified oligonucleotides (e.g. for improved stability, targeting, etc.) and should be delivered to cells which express the peptides and proteins of interest of the current invention in vivo, like, for example, ES cells. A preferred method of delivery involves using a DNA construct “encoding” the ribozyme under the control of a strong constitutive pol III or pol II promoter, so that transfected cells will produce sufficient quantities of the ribozyme to destroy the endogenous messages specific for the peptides and proteins of interest of the current invention and inhibit translation. Because ribozymes unlike antisense molecules, are catalytic, a lower intracellular concentration is required for efficiency.

[0213] Endogenous gene expression can also be reduced by inactivating or “knocking out” the gene of interest specific for a peptide or protein of the current invention or its promoter using targeted homologous recombination. (e.g., see Smithies et al., 1985, Nature 317:230-234; Thomas & Capecchi, 1987, Cell 51:503-512; Thompson et al., 1989 Cell 5:313-321; each of which is incorporated by reference herein in its entirety). For example, a mutant, non-functional peptide or protein of interest of the current invention (or a completely unrelated DNA sequence) flanked by DNA homologous to the endogenous gene encoding said peptide or protein of interest of the current invention (either the coding regions or regulatory regions of the gene) can be used, with or without a selectable marker and/or a negative selectable marker, to transfect cells that express said peptide or protein of interest of the current invention in vivo. Insertion of the DNA construct, via targeted homologous recombination, results in inactivation of the targeted endogenous gene. Such approaches are particularly suited in the agricultural field where modifications to ES cells can be used to generate animal offspring with an inactive copy of a gene encoding a peptide or protein of interest of the current invention (e.g., see Thomas & Capecchi 1987 and Thompson 1989, supra). However this approach can be adapted for use in humans provided the recombinant DNA constructs are directly administered or targeted to the required site in vivo using appropriate viral vectors.

[0214] Alternatively, endogenous expression of a gene of interest can be reduced by targeting deoxyribonucleotide sequences complementary to the regulatory region of said gene (i.e., the promoter and/or enhancers) to form triple helical structures that prevent transcription of the gene of interest in target cells in the body. (See generally, Helene, C. 1991, Anticancer Drug Des., 6(6):569-84; Helene, C. et al., 1992, Ann, N.Y. Acad. Sci., 660:27-36; and Maher, L.J., 1992, Bioassays 14(12):807-15).

[0215] In yet another embodiment of the invention, the activity of a peptide or protein of interest of the current invention can be reduced using a “dominant negative” approach. A dominant negative approach takes advantage of the interaction of the peptides or proteins of interest with other peptides or proteins to form complexes, the formation of which is a prerequisite for the peptide or protein of interest of the current invention to exert its physiological activity. To this end, constructs which encode a defective form of the peptide or protein of interest of the current invention can be used in gene therapy approaches to diminish the activity of said peptide or protein of interest in appropriate target cells. Alternatively, targeted homologous recombination can be utilized to introduce such deletions or mutations into the subject's endogenous gene encoding the peptide or protein of interest of the current invention in the appropriate tissue. The engineered cells will express non-functional copies of the peptide or protein of interest of the current invention, thereby downregulating its activity in vivo. Such engineered cells should demonstrate a diminished response to physiological stimuli of the activity of the affected peptide or protein of interest of the current invention, resulting in reduction of the development or cell differentiation disorder phenotype.

[0216] 5.7.2 Restoration or Increase in Expression or Activity of a Peptide or Protein of the Current Invention to Promote Development or Cell Differentiation

[0217] With respect to an increase in the level of normal gene expression and/or gene product activity specific for any of the peptides and proteins of interest of the current invention, the respective nucleic acid sequences can be utilized for the treatment of development and cell differentiation disorders. Where the cause of the development or cell differentiation dysfunction is a defective peptide or protein of the current invention, treatment can be administered, for example, in the form of gene delivery or gene therapy. Specifically, one or more copies of a normal gene or a portion of the gene that directs the production of a gene product exhibiting normal function of the appropriate peptide or protein of the current invention, may be inserted into the appropriate cells within a patient or animal subject, optionally using suitable vectors. Recombinant retroviruses have been widely used in gene transfer or gene delivery experiments and even human clinical trials (see generally, Mulligan, R. C., Chapter 8, In: Experimental Manipulation of Gene Expression, Academic Press, pp. 155-173 (1983); Coffin, J., In: RNA Tumor Viruses, Weiss, R. et al. (eds.), Cold Spring Harbor Laboratory, Vol. 2, pp. 36-38 (1985). Other eucaryotic viruses which have been used as vectors to transduce mammalian cells include adenovirus, papilloma virus, herpes virus, adeno-associated virus, vaccinia virus, rabies virus, and the like (See generally, Sambrook et al., Molecular Cloning, Cold Spring Harbor Laboratory Press, Cold Spring Harbor, N.Y., Vol. 3:16.1-16.89 (1989). Alternatively, cationic or other lipids may be employed to deliver polynucleotides comprising (or including) the described GTS sequences to patients. Additionally, naked DNA comprising one or more GTS sequences, optionally modified by the addition of one or more of, in operable combination and orientation, a promoter, an enhancer, a ribosome entry or ribosome binding site, and/or an in-frame translation initiation codon can be employed to deliver GTSs to a patient. Another use of the above constructs includes “naked” DNA vaccines that can be introduced in vivo alone, or in conjunction with excipients, or microcarrier spheres, nanoparticles or other supporting or dosaging compounds or molecules.

[0218] The gene replacement/delivery therapies described above should be capable of delivering gene sequences to the cell types within patients which express the peptide or protein of interest of the current invention. Alternatively, targeted homologous recombination can be utilized to correct the defective endogenous gene in the appropriate cell type. In animals, targeted homologous recombination can be used to correct the defect in ES cells in order to generate offspring with a corrected trait.

[0219] Finally, compounds identified in the assays described above that stimulate, enhance, or modify the activity of the peptides and proteins of the current invention can be used to achieve proper development and cell differentiation. The formulation and mode of administration will depend upon the physico-chemical properties of the compound.

[0220] 5.8 Pharmaceutical Preparation and Methods of Administration

[0221] Compounds that are determined to affect gene expression of the peptides and proteins of the current invention, comprise nucleotide sequence information that is at least partially first disclosed in the Sequence Listing (i.e., sequences used in antisense, gene therapy, dsRNA, or ribozyme applications), or the interaction of such peptides and proteins with any of their binding partners, can be administered to a patient at therapeutically effective doses to treat or ameliorate development and cell differentiation disorders. A therapeutically effective dose refers to that amount of the compound sufficient to result in any amelioration or retardation of disease symptoms, or development and cell differentiation or proliferation disorders.

[0222] 5.8.1 Effective Dose

[0223] Toxicity and therapeutic efficacy of such compounds can be determined by standard pharmaceutical procedures in cell cultures or experimental animals, e.g., for determining the LD₅₀ (the dose lethal to 50% of the population) and the ED₅₀ (the dose therapeutically effective in 50% of the population). The dose ratio between toxic and therapeutic effects is the therapeutic index and it can be expressed as the ratio LD₅₀/ED₅₀. Compounds which exhibit large therapeutic indices are preferred. While compounds that exhibit toxic side effects may be used, care should be taken to design a delivery system that targets such compounds to the site of affected tissue in order to minimize potential damage to uninfected cells and, thereby, reduce side effects.

[0224] The data obtained from the cell culture assays and animal studies can be used in formulating a range of dosage for use in humans. The dosage of such compounds lies preferably within a range of circulating concentrations that include the ED₅₀ with little or no toxicity. The dosage may vary within this range depending upon the dosage form employed and the route of administration utilized. For any compound used in the method of the invention, the therapeutically effective dose can be estimated initially from cell culture assays. A dose may be formulated in animal models to achieve a circulating plasma concentration range that includes the IC₅₀ (i.e., the concentration of the test compound which achieves a half-maximal inhibition of symptoms) as determined in cell culture. Such information can be used to more accurately determine useful doses in humans. Levels in plasma may be measured, for example, by high performance liquid chromatography.

[0225] When the therapeutic treatment of disease is contemplated, the appropriate dosage may also be determined using animal studies to determine the maximal tolerable dose, or MTD, of a bioactive agent per kilogram weight of the test subject. In general, at least one animal species tested is mammalian. Those skilled in the art regularly extrapolate doses for efficacy and avoiding toxicity to other species, including human. Before human studies of efficacy are undertaken, Phase I clinical studies in normal subjects help establish safe doses.

[0226] Additionally, the bioactive agent may be complexed with a variety of well established compounds or structures that, for instance, enhance the stability of the bioactive agent, or otherwise enhance its pharmacological properties (e.g., increase in vivo half-life, reduce toxicity, etc.).

[0227] The above therapeutic agents will be administered by any number of methods known to those of ordinary skill in the art including, but not limited to, administration by inhalation; by subcutaneous (sub-q), intravenous (I.V.), intraperitoneal (I.P.), intramuscular (I.M.), or intrathecal injection; or as a topically applied agent (transderm, ointments, creams, salves, eye drops, and the like).

[0228] 5.8.2 Formulations and Use

[0229] Pharmaceutical compositions for use in accordance with the present invention may be formulated in conventional manner using one or more physiologically acceptable carriers or excipients.

[0230] Thus, the compounds and their physiologically acceptable salts and solvates may be formulated for administration by inhalation or insufflation (either through the mouth or the nose) or oral, buccal, parenteral or rectal administration.

[0231] For oral administration, the pharmaceutical compositions may take the form of, for example, tablets or capsules prepared by conventional means with pharmaceutically acceptable excipients such as binding agents (e.g., pregelatinised maize starch, polyvinylpyrrolidone or hydroxypropyl methylcellulose); fillers (e.g., lactose, microcrystalline cellulose or calcium hydrogen phosphate); lubricants (e.g., magnesium stearate, talc or silica); disintegrants (e.g., potato starch or sodium starch glycolate); or wetting agents (e.g., sodium lauryl sulphate). The tablets may be coated by methods well known in the art. Liquid preparations for oral administration may take the form of, for example, solutions, syrups or suspensions, or they may be presented as a dry product for constitution with water or other suitable vehicle before use. Such liquid preparations may be prepared by conventional means with pharmaceutically acceptable additives such as suspending agents (e.g., sorbitol syrup, cellulose derivatives or hydrogenated edible fats); emulsifying agents (e.g., lecithin or acacia); non-aqueous vehicles (e.g., almond oil, oily esters, ethyl alcohol or fractionated vegetable oils); and preservatives (e.g., methyl or propyl-p-hydroxybenzoates or sorbic acid). The preparations may also contain buffer salts, flavoring, coloring and sweetening agents as appropriate.

[0232] Preparations for oral administration may be suitably formulated to give controlled release of the active compound.

[0233] For buccal administration the compositions may take the form of tablets or lozenges formulated in conventional manner.

[0234] For administration by inhalation, the compounds for use according to the present invention are conveniently delivered in the form of an aerosol spray presentation from pressurized packs or a nebulizer, with the use of a suitable propellant, e.g., dichlorodifluoromethane, trichlorofluoromethane, dichlorotetrafluoroethane, carbon dioxide or other suitable gas. In the case of a pressurized aerosol, the dosage unit may be determined by providing a valve to deliver a metered amount. Capsules and cartridges of e.g. gelatin for use in an inhaler or insufflator may be formulated containing a powder mix of the compound and a suitable powder base such as lactose or starch.

[0235] The compounds may be formulated for parenteral administration by injection, e.g., by bolus injection or continuous infusion. Formulations for injection may be presented in unit dosage form, e.g., in ampules or in multi-dose containers, with an added preservative. The compositions may take such forms as suspensions, solutions or emulsions in oily or aqueous vehicles, and may contain formulatory agents such as suspending, stabilizing and/or dispersing agents. Alternatively, the active ingredient may be in powder form for constitution with a suitable vehicle, e.g., sterile pyrogen-free water, before use.

[0236] The compounds may also be formulated as compositions for rectal administration such as suppositories or retention enemas, e.g., containing conventional suppository bases such as cocoa butter or other glycerides.

[0237] In addition to the formulations described previously, the compounds may also be formulated as a depot preparation. Such long acting formulations may be administered by implantation (for example subcutaneously or intramuscularly) or by intramuscular injection. Thus, for example, the compounds may be formulated with suitable polymeric or hydrophobic materials (for example as an emulsion in an acceptable oil) or ion exchange resins, or as sparingly soluble derivatives, for example, as a sparingly soluble salt. The compositions may, if desired, be presented in a pack or dispenser device which may contain one or more unit dosage forms containing the active ingredient. The pack may, for example, comprise metal or plastic foil, such as a blister pack. The pack or dispenser device may be accompanied by instructions for administration.

[0238] The examples below are provided to illustrate the subject invention. These examples are provided by way of illustration and are not included for the purpose of limiting the invention in any way whatsoever.

### 6. EXAMPLES

[0239] 6.1 Construction of Trapped cDNA Libraries

[0240] The GTSs represented in SEQ ID NOS:9-1008 were generated using normalized cDNA libraries produced as described in U.S. application Ser. No. 60/095,989, filed Aug. 10, 1998 entitled “Construction of Normalized cDNA Libraries From Animal Cells” (also identified as attorney docket no. 8535-021-888), by Nehls et al., the disclosure of which is herein incorporated by reference in its entirety.

[0241] FIG. 1A provides a representative illustration of the retroviral vector used to produce the described polynucleotides. In brief, pools of modified human PA-1 teratocarcinoma cells (e.g., PA-2, PA-1 that has been transfected to express the murine ecotropic retrovirus receptor) were typically infected at an m.o.i. between about 0.01 and about 0.1 (although much higher m.o.i.'s such as 1 to more than 10 could have been used). FIG. 1B schematically shows how the target cell genomic locus is presumably mutated by the integration of the retroviral construct into intronic sequences of the cellular gene. The integrated retrovirus results in the generation of two chimeric transcripts. As illustrated in FIG. 1C, the first chimeric transcript is a fusion between the coding region of the resistance marker (neo was used to produce the presently described GTSs) carried within the transgenic construct and the downstream exon(s) from the cellular gene. A mature transcript is generated when the indicated splice donor (SD) and splice acceptor (SA) sites are spliced. Translation of this fusion transcript produces the protein encoded by the resistance marker and allows for selection of gene trapped target cells, although selection is not required to produce the described polynucleotides.

[0242] Another chimeric transcript is shown in FIG. 1C. This transcript is a fusion between the first exon of the transgenic construct (EXON1—the first exon of the murine btk gene was used as the sequence acquisition component for the described GTSs) and downstream exons from the cellular genome. Unlike the transcript encoding the selectable marker exon, the transcript encoding EXON1 is transcribed under the control of a vector encoded, and hence exogenously added, promoter (such as the PGK promoter), and the corresponding mRNA is generated by splicing between the indicated SD and SA sites. The region encoding the sequence acquisition exon (EXON1) has also been engineered to incorporate a unique sequence that permits the selective enrichment of the fusion transcript using molecular biological methods such as, for example, the polymerase chain reaction (PCR). These sequences serve as unique primer binding sites for EXON1-specific PCR amplification of the transcript and can additionally incorporate one or several rare-cutter endonuclease restriction sites to allow site-specific cloning. These features allow for the efficient and preferential cloning of transgene expressed fusion transcripts from pools of target cells relative to the background of cellularly encoded transcripts.

[0243] Based on the unique sequence present in EXON1, that is schematically indicated as a rare-cutter (A) restriction site in FIG. 1B, selective cloning of the fusion transcript is achieved as shown in FIG. 1D. cDNA was generated by reverse transcribing isolated RNA from pools of cells that have undergone independent gene trap events using, for example, RTT-1 as a deoxyoligonucleotide primer. The 3′ end of the RTT-1 primer consisted of a homopolymeric stretch of deoxythymidine residues that bound to the polyadenylated end of the mRNA. At its 5′ end, the oligonucleotide contained a sequence that can serve as a binding site for a second and a third primer (GET-2 and GET-2N). In the center, RTT-1 contains the sequence of a second rare-cutter (B) restriction site. Depending on the size of the pool and the transcriptional levels of the fusion transcript, second strand synthesis was carried out either with deoxyoligonucleotide primer BTK-1 using Klenow polymerase or by a polymerase chain reaction (PCR) in the presence of primers BTK-1 and GET-2.

[0244] The second strand reaction products that were generated by PCR were digested with restriction endonucleases that recognize their corresponding restriction site (e.g., A and B). Additionally, PCR conditions were suitably modified using a variety of established procedures for enhancing the size of the PCR products. Such methods are described, inter alia, in U.S. Pat. No. 5,556,772, and/or the PanVera (Madison, Wis.) New Technologies for Biomedical Research catalog (1997/98) both of which are herein incorporated by reference.

[0245] Prior to cloning, the PCR cDNA fragments were size-selected using conventional methods such as, for example, chromatography, gel-electrophoresis, and the like. Alternatively or in addition to this size selection, the PCR templates could have been previously size selected into separate template pools.

[0246] After digestion with suitable restriction enzymes, and size selection as described above, the cleaved cDNAs were directionally cloned into phage vectors (see FIG. 1D), although any other cloning vector/vehicle could have been used. Such vectors are generically referred to as gene trapped sequence vectors, or “GTS vectors” in FIG. 1D), preferably incorporating a multiple cloning site with restriction sites corresponding to those incorporated into the amplified cDNAs (e.g., Sfi I, which allows for directional cloning of the cDNAs). After cloning, the resulting phage were handled as a conventional cDNA library using standard procedures. Individual colonies and/or plaques were picked and used to generate PCR derived (using the primers indicated below) templates for DNA sequencing reactions.

[0247] A more detailed description of the above follows. The btk gene trap vector was introduced into human PA-2 cells using standard techniques. In brief, vector/virus containing supernatant from GP+E or AM12 packaging cells was added to approximately 50,000 cells (at an input ratio between about 0.1 and about 0.1 virus/target cell) for between about 16 to about 24 hours, and the cells were subsequently selected with G418 at active concentration of about 400 micrograms/ml for about 10 days. Between about 600 and about 3,000 G418 resistant colonies were subsequently pooled, and subjected to RNA isolation, reverse transcription, PCR, restriction digestion, size selection, and subcloning into lambda phage vectors. Individual phage plaques were directly amplified, purified, and sequenced to obtain the corresponding GTS.

[0248] When selection is not used, about 1×10⁶ cells (PA-2, Hela, HepG2, or Jurkatt cells) per 100 mm dish were plated and infected with AM12 packaged btk retrovirus at an m.o.i. of approximately 0.01. After a 16 h incubation, the cells were washed in PBS and grown in culture media for four days. RNA from each plate was extracted, reverse transcribed, and the resulting cDNA was subject to two rounds of PCR, each for 25 cycles. The resulting PCR products were digested with Sfi and separated by gel electrophoresis. Six size fractions (between about 300 and about 4,000 bp) were recovered and each fraction was ligated into lambdaGT10Sfi arms, in vitro packaged, and plated for lysis. Individual plaques were picked from the plates, subject to an additional round of PCR, and subsequently sequenced to obtain the described GTSs. The particulars are described in greater detail below.

[0249] FIG. 1 shows the chimeric fusion transcript that is formed when the first exon of the transgenic construct (EXON1—the first exon of the murine btk gene was used as the sequence acquisition component for the described GTSs) is spliced to downstream exons from the cellular genome. Unlike the transcript encoding the selectable marker exon, the transcript encoding EXON1 is transcribed under the control of a vector encoded, and hence exogenously added, promoter (such as the PGK promoter), and the corresponding mRNA is generated by splicing between the indicated SD and SA sites. The region encoding the sequence acquisition exon (EXON1) has also been engineered to incorporate a unique sequence that permits the selective enrichment of the fusion transcript using molecular biological methods such as, for example, the polymerase chain reaction (PCR). These sequences serve as unique primer binding sites for EXON1-specific PCR amplification of the transcript and can additionally incorporate one or several rare-cutter endonuclease restriction sites to allow site-specific cloning. These features allow for the efficient and preferential cloning of transgene expressed fusion transcripts from pools of target cells relative to the background of cellularly encoded transcripts.

[0250] Based on the unique sequence present in EXON1, that is schematically indicated as a rare-cutter (A) restriction site in FIG. 1B, selective cloning of the fusion transcript is achieved as shown in FIG. 1D. cDNA was generated by reverse transcribing isolated RNA from pools of cells that have undergone independent gene trap events using, for example, RTT-1 as a deoxyoligonucleotide primer. The 3′ end of the RTT-1 primer consisted of a homopolymeric stretch of deoxythymidine residues that bound to the polyadenylated end of the mRNA. At its 5′ end, the oligonucleotide contained a sequence that can serve as a binding site for a second and a third primer (GET-2 and GET-2N). In the center, RTT-1 contains the sequence of a second rare-cutter (B) restriction site. Depending on the size of the pool and the transcriptional levels of the fusion transcript, second strand synthesis was carried out either with deoxyoligonucleotide primer BTK-1 using Klenow polymerase or by a polymerase chain reaction (PCR) in the presence of primers BTK-1 and GET-2.

[0251] The second strand reaction products that were generated by PCR were digested with restriction endonucleases that recognize their corresponding restriction site (e.g., A and B). Additionally, PCR conditions were suitably modified using a variety of established procedures for enhancing the size of the PCR products. Such methods are described, inter alia, in U.S. Pat. No. 5,556,772, and/or the PanVera (Madison, Wis.) New Technologies for Biomedical Research catalog (1997/98) both of which are herein incorporated by reference.

[0252] Prior to cloning, the PCR cDNA fragments were size-selected using conventional methods such as, for example, chromatography, gel-electrophoresis, and the like. Alternatively or in addition to this size selection, the PCR templates could have been previously size selected into separate template pools.

[0253] After digestion with suitable restriction enzymes, and size selection as described above, the cleaved cDNAs were directionally cloned into phage vectors (see FIG. 1D), although any other cloning vector/vehicle could have been used. Such vectors are generically referred to as gene trapped sequence vectors, or “GTS vectors” in FIG. 1D), preferably incorporating a multiple cloning site with restriction sites corresponding to those incorporated into the amplified cDNAs (e.g., Sfi I, which allows for directional cloning of the cDNAs). After cloning, the resulting phage were handled as a conventional cDNA library using standard procedures. Individual colonies and/or plaques were picked and used to generate PCR derived (using the primers indicated below) templates for DNA sequencing reactions.

[0254] Total cell RNA isolation was conducted using RNAzol (Friendswood, Tex., 77546) per the manufacturer's specifications. An RT premix containing 2× First Strand buffer, 100 mM Tris-HCl, pH 8.3, 150 mM KCl, 6 mM MgCl₂, 2 mM dNTPs, RNAGuard (1.5 units/reaction, Pharmacia), 20 mM DTT, RTT-1 primer (3 pmol/rxn, GenoSys Biotechnologies, sequence: 5′ tggctaggccccaggataggcctcgctggccttttttttttttttttt 3′, SEQ ID NO: 1) and Superscript II enzyme (200 units/rxn, Life Technologies) was added. The plate/tube was transferred to a thermal cycler for the RT reaction (37° C. for 5 min. 42° C. for 30 min. and 55° C. for 10 min).

[0255] The cDNA was amplified using two distinct, and preferably nested, stages of PCR. The PCR premix contained: 1.1× MGBIl buffer (74 mM Tris pH 8.8, 18.3 mM Ammonium Sulfate, 7.4 mM MgCl₂, 5.5 mM 2ME, 0.011% Gelatin), 11.1% DMSO (Sigma), 1.67 mM τdNTPS, Taq (5 units/rxn), water and primers. The sequences of the first round primers are: BTK-1 5′ gccatggctccggtaggtccagag 3′, SEQ ID NO:2 (GET-2, 5′ tggctaggccccaggatag 3′, SEQ ID NO:3), (about 7 pmol/rxn). The sequences of the second round primers are BTK-4 5′ gtccagagatggccatagc 3′, SEQ ID NO:4 (GET-2N 5′ ccaggataggcctcgctg 3′, SEQ ID NO:5), (used at about 20 pmol/rxn). The outer premix was added to an aliquot of cDNA and run for 20 cycles (94° C. for 45 sec., 56° C. for 60 sec 72° C. for 2-4 min). An aliquot of this product was added to the inner premix and cycled at the same temperatures 20 times.

[0256] The PCR products of the second amplification series were extracted using phenol/chloroform, chloroform, and isopropanol precipitated in the presence of glycogen/sodium acetate. After centrifugation, the nucleic acid pellets were washed with 70 percent ethanol and were resuspended in TE, pH 8. After digestion with Sfi I at 55° C., the digested products were loaded onto 0.8% agarose gels and size-selected using DEAE membranes as described (Sambrook et al., 1989, supra). Generally, six approximate size-fractions (<700 bp, 700-900 bp, 900-1,300 bp, 1,300-1,600 bp, 1,600-2,000 bp, >2,000 bp) were separately ligated into GTS vector arms that were engineered to contain the corresponding Sfi I “A” and “B” specific overhangs (i.e., TAG and GCG, respectively). The ligation products were packaged using commercially available lambda packaging extracts (Promega), and plated using E. coli strain C600 using conventional procedures (Sambrook et al., 1989, supra). Individual plaques were directly picked into 40 microliters of PCR buffer and subjected to 35 cycles of PCR [at 94° C. for 45 sec., 56° C. for 60 sec 72° C. for 1-3 min (depending on the size fraction)] using 12 pmol of the primers SEQ-4, 5′ tacagttmcttgtgaagattg 3′, SEQ ID NO:6 and SEQ-5, 5′ gggtagtccccaccttttg 3′, SEQ ID NO:7, per PCR reaction. The cloned 3′ RACE products were purified using an S300 column equilibrated in STE essentially as described in Nehls et al., 1993, TIG,9:336-337, and the products were recovered by centrifugation at 1,200×g for 5 min. This step removes unincorporated nucleotides, oligonucleotides, and primer-dimers. The PCR products were subsequently applied to a 0.25 ml bed of Sephadex® G-50 (DNA Grade, Pharmacia Biotech AB) that was equilibrated in MilliQ H₂O, and recovered by centrifugation as described above. Purified PCR products were quantified by fluorescence using PicoGreen (Molecular Probes, Inc., Eugene, Oreg.) as per the manufacturer's instructions.

[0257] Dye terminator cycle sequencing reactions with AmpliTaq® FS DNA polymerase (Perkin Elmer Applied Biosystems, Foster City, Calif.) were carried out using 7 pmoles of primer (Oligonucleotide BTK-3; 5′ tccaagtcctggcatctcac 3′, SEQ ID NO:8) and approximately 30-120 ng of 3′ template. Unincorporated dye terminators were removed from the completed sequencing reactions using G-50 columns as described above. The reactions were dried under vacuum, resuspended in loading buffer, and electrophoresed through a 6% Long Ranger acrylamide gel (FMC BioProducts, Rockland, Maine) on an ABI Prism® 377 with XL upgrade as per the manufacturer's instructions. The sequences of the amplicons, or GTSs, are described in SEQ ID NOS:9-1008.

[0258] All publications and patents mentioned in the above specification are herein incorporated by reference. Various modifications and variations of the described method and system of the invention will be apparent to those skilled in the art without departing from the scope and spirit of the invention. Although the invention has been described in connection with specific preferred embodiments, it should be understood that the invention as claimed should not be unduly limited to such specific embodiments. Indeed, various modifications of the above-described modes for carrying out the invention which are obvious to those skilled in the field of molecular biology or related fields are intended to be within the scope of the following claims.

1. An oligonucleotide comprising a contiguous stretch of at least about 15 nucleotides first disclosed in at least one of SEQ ID NOS:9-1008.

2. An isolated cDNA polynucleotide derived from the genome of a human that is capable of hybridizing to a sequence first disclosed in at least one of SEQ ID NOS:9-1008 under stringent conditions.

3. An isolated polynucleotide comprising a contiguous stretch of at least about 60 nucleotides first disclosed in at least one of SEQ ID NOS:9-1008.

4. The isolated polynucleotide according to claim 3, wherein said polynucleotide sequence comprises at least one of SEQ ID NOS:9-1008.

5. An in vitro process for producing a polynucleotide comprising the steps of:
a) obtaining a polynucleotide template encoding a sequence capable of hybridizing to a GTS of SEQ ID NOS:9-1008;
b) combining said template with a synthetic oligonucleotide sequence of about 14 to about 80 bases in length that comprises a contiguous sequence of at least about 12 nucleotides disclosed in one of SEQ ID NOS:9-1008; and
c) processing the combined oligonucleotide and template preparation such that said oligonucleotide sequence hybridizes to said template in the presence of a DNA polymerase molecule and a sufficient concentration of dNTPs for said oligonucleotide sequence to prime DNA synthesis by said polymerase,
wherein a polynucleotide is produced that encodes at least about 50 contiguous nucleotides first disclosed in one of SEQ ID NOS:9-1008.

6. The process of claim 5 wherein said template is mammalian cDNA.

7. The process of claim 5 wherein said template is mammalian genomic DNA.

8. The process according to claim 6 wherein said templates are of human origin.

9. The process according to claim 7 wherein said templates are of human origin.

The application's sequence listing, which the Patent Office published only in electronic form, follows.

SEQUENCE LISTING (1008 sequences)

SEQ ID NO: 1 - DNA, 40 bp, Artificial Sequence
  Primer
tggctaggccccaggataggcctcgctggccttttttttt

SEQ ID NO: 2 - DNA, 24 bp, Artificial Sequence
  Primer
gccatggctccggtaggtccagag

SEQ ID NO: 3 - DNA, 19 bp, Artificial Sequence
  Primer
tggctaggccccaggatag

SEQ ID NO: 4 - DNA, 19 bp, Artificial Sequence
  Primer
gtccagagatggccatagc

SEQ ID NO: 5 - DNA, 18 bp, Artificial Sequence
  Primer
ccaggataggcctcgctg

SEQ ID NO: 6 - DNA, 23 bp, Artificial Sequence
  Primer
tacagtttttcttgtgaagattg

SEQ ID NO: 7 - DNA, 19 bp, Artificial Sequence
  Primer
gggtagtccccaccttttg

SEQ ID NO: 8 - DNA, 20 bp, Artificial Sequence
  Primer
tccaagtcctggcatctcac

SEQ ID NO: 9 - DNA, 184 bp, Homo sapiens
  misc_feature (1)...(184): n = A,T,C or G
ataagcagataatgcctggncatgcaancttannaccgnactgntgtttgcaagctgnntaagtgagcaaatcttgggaagatttcaagcacaccaacatggcacatgtatacatatgtaacaaacctgcacattgtgcacatgtaccctaaaacttaaagtgtaacaataataaaattttttt

SEQ ID NO: 10 - DNA, 309 bp, Homo sapiens
ggaagctttcacaccacattttgtttcctgacaagagaaggagaaatcgttggcctctgcgtgacatggagggtccccccacctgcaagcttttgtgtttgctggatcttggacagtaccctggcgaaaagcattcggcaagattatccggctagcacagccttcaaggaataaatatctaacaccttgttccctttgcggttcaaaagccactgtcactggggtacataggcagttttaaaaaaggctacaattcatatgcaaactagaggaggatttccatgatttcataataaaatgttgaaacgc

SEQ ID NO: 11 - DNA, 143 bp, Homo sapiens
  misc_feature (1)...(143): n = A,T,C or G
gtggccatgtacttggcttaaagttaaggattctactactgtngaaganggagagaacggnttctagaggacaactggcagtctccttgtagctgagacttttttgtgtataaaaattaataaaattggtttattaatttgtt

SEQ ID NO: 12 - DNA, 210 bp, Homo sapiens
atctatgcagattagctctctgcccttcctttaataactggactcttggagcatctgattgacagagatgggggtttcgccatgttgcccaggctggtctcaagctcctgaactcaagtgatcttcccacctaagcctcccaaagtgctgggattacaggcatgagccacgactcccagcctgaaatatagattttaatcttcagcttgc

SEQ ID NO: 13 - DNA, 453 bp, Homo sapiens
  misc_feature (1)...(453): n = A,T,C or G
gtatacatccagatggccggaagcaactgaagatccacaaaagaagtgaaaatagccgtaactgatgacattccaccattgtgatttgtttctgccccaccgtaactgatcaatgtactttgtaatctcccccacccttaagaaggttctttgtaatctcccccacccttaagaatgttctttgtaattctccccacccttgagaatgtactttgtgagatctaccccctgcccacaaaacattggtcctgactccaccgcctatcccaaaacctataagaactaatgataatcccaccaccctttgctgactctcttttcggactcagcccgcctgcacccaggtgaaataaacagccttgttgctcacaaaaataaaaaaaaaggccagcgaggccaattcagcttggacttaaccaggctngaccttggtnnaaaaggggggctcccccc

SEQ ID NO: 14 - DNA, 344 bp, Homo sapiens
tgcctccagaaagaacgcagccctactgacaccttggttttggcctggtgagaccaactttggacttttcacttccaaaactaatttcgctcttgttgcccaggctggagtgcaatgacgagatcttggctcactgcaacctccacctcccaggtttaagtgattctcctgcctcagcctcccaagtagctgggattacaggaagaaaaatggaactaaaaagggaaaacaatagcaacaaagatcaaaataaataacaaggaagcggagagaagaaagaacatggtgaagagagtgaaaagcattgtcatttggggtgaattgcagaaagaaataaattattg

SEQ ID NO: 15 - DNA, 473 bp, Homo sapiens
  misc_feature (1)...(473): n = A,T,C or G
atgcttcctgggaagctcccaggagcccaacctaagaagaggggaaggcccagaggagccaggagcgagatctttgacactacctgcttccccacctgctgctgccttgtctgggctggagctgtgctaagagcagttctaggacagatgaggagacaactgttctgcccggggctaaggactgaaccctccaggtctacatttctctttgccatactgctctgggctctgggggttgacctgaatggaccacacagccatggtgtctcctgtcctccaccttcactggtgaagactgggagtgaggaagaagagtgagattgcaccctctctgcaggaccatgggcagaccctgccccttacctcttctcaggggtctctcttctctcctattaacttctttccatttccctnattaagccctttgntttggttttttggganattgccggccnncaccttttggaaaattg

SEQ ID NO: 16 - DNA, 403 bp, Homo sapiens
gagtctactgacagaagccaaaggttgctgctagtttcagcttcctggtgttcctcattattttcaaaaatgtctgactgcatcttttggacattataaaaaccacagtaggaaaaaacgccagctatttcaatggaccaacaaagtgagactccaaagtgagccaagaagtcctcaaagcccttcctaaaggatggaggaacacatgaatatatacatcaaatcctccttccacagagactcactgaagggaatgaagaagggaaaagtcctcctaattattaagatgcgttccttgggactcggagaattaggaaggaaacccccaagtcttgaatacatttctctaaagaggccgaatacttaataatcaggggagattaaagcaaatgggagacccctt

SEQ ID NO: 17 - DNA, 445 bp, Homo sapiens
  misc_feature (1)...(445): n = A,T,C or G
agacgggggtctcactacgttgcccaggctgatcttgaactcctgcctcaaatgaccctcctgcctcagcctcccaaagtgctgcgattaaaggcacaagccactgtgcccaaccaaagggtcttgctctgtcgcccaggctagagtgcagtggcgcaatcttggctcatggcaacctccacctcccgggttcaagcgattctcctgccacagcctcccgagtagctgggattacaggtgcctaccaccaggcccagctaaatttttttgtatttttagtacagacggggtttcgccaccttggccaggctggtcttgaactcctgaccttgtgatctacccacctnagnntcccaangggctggnattacaggggggagagaccggacccagccaccttactgngtttctgantgnnntttcctttcctttccttttcccttaa

SEQ ID NO: 18 - DNA, 486 bp, Homo sapiens
  misc_feature (1)...(486): n = A,T,C or G
agacgggggtctcactacgttgcccaggctgatcttgaactcctgcctcaaatgaccctcctgcctcagcctcccaaagtgctgcgattaaaggcacaagccactgtgcccaaccaaagggtcttgctctgtcgcccaggctagagtgcagtggcgcaatcttggctcatggcaacctccacctcccgggttcaagcgattctcctgccacagcctcccgagtagctgggattacaggtgcctaccaccaggcccagctaatttttttgtatttttagtacagacggggtttcgccaccttggccaggctggtcttgaactcctgaccttgtgatctacccacctcagtctcccaaagtgctgggattacaggtgtgagagaccgcacccaggcaccttactgaggttctgaatgntcttttcnttctttttcctttttcccttaaattggcccaaagtttnatccttggctttttttactggcta

SEQ ID NO: 19 - DNA, 443 bp, Homo sapiens
  misc_feature (1)...(443): n = A,T,C or G
ngnngaggaanngtgnctgagnncntgctngaancnnatgntgngacnctnnctgtgtnanntgcggaacttagaaacagagnttcaccatgttggccaagatggnctngatntcctgacctcgtgatccgcccacctcagcctcccaaagtgctgggattacaggcacgaaccactgcgcccggcccaaaatgaaaggagccccaggcctctcaaaaagtatgaaagaactggaattcaccagatcatcacatccagacaatgagacaccaggcccctcattcatcatgatggcttctttacccctatggagttcctgttttcccttagatagttacatttcttccctgctatataaacccctaattttaagtcaatcccgaagacggatttgagcttcaagcttccatcttctttggctgnagaacctggttaaaggcctt

SEQ ID NO: 20 - DNA, 360 bp, Homo sapiens
  misc_feature (1)...(360): n = A,T,C or G
ggtttcgctctgttgcccaggctggagcgcagcggcatgatctcggctcactgcaacctccacctcccgtgttcaagtgattcttctgcctcagccaccaaggcgggcgtcccaaagtgctgggattacaggtgtgagccactgcacctggcttagaaatcttttcattctttcaacatgaatcctgctcttagaatcacagagtacaaagcttcctggtacaggtggggaaactgaggctccgagttgcctatctgattctgaggacacagcaccccccaccagcacacctggcacttgctttgtatattagtgtcattcggcacaagttagtggaaaatannagcataatatatagct

SEQ ID NO: 21 - DNA, 212 bp, Homo sapiens
gaaccaagactccttggataagtggctgattccagaggtatagcagataaagtataaggtcttcagaatgagagaagatatgccaaagactttttatctatacctgttcctgttatgatgatgaaatcctggactactagactgaatctgataccaaaattggaagagtttttgggtatcttgggagaggacattttggttgtgcttgcatt

SEQ ID NO: 22 - DNA, 456 bp, Homo sapiens
  misc_feature (1)...(456): n = A,T,C or G
cagaactcgagggacatgganagctcgatgccacnaccccactagagccagggtgataaatagagaanatggctagggtagagcacacaaggagagcaggttcagggagagatgaagatgagaccaaagcgggaagagtgaagggaaaattaacctccccttgctgagacgtgtgacactcaaggcccaaatcagaaaacttctgcttgaggaaacattactctttcctccatgactgctggtggtatccatctgtcagactccctgagccttgatgcccctcactccttctgctgtggagtaggaacgtgaaacacaaacagtcatccctccaattcctccaacccatgggggattggntccatganccctaacaaaataccaaatttcatggatgttcaagtcccttattgcaaatgggcatggtatttgcatataacccgatgcacatccccc

SEQ ID NO: 23 - DNA, 350 bp, Homo sapiens
  misc_feature (1)...(350): n = A,T,C or G
ggaaattgaccattgcttccagacatgtgtgggagtccagaacatgccaccccaaaaggaggattgttgagctgaagacaattaagaagaaacagatgcaggaaagctctctgccctccatttgcttaaatgcaggacagagatttacaagataaaagacatcctgcccctgtcttttaccagggngaacaaaggttaaccactgaagacagttttagaccattatctgccaggagtagnagncagaggaatctacctgaacatgctttaccaactcgcttttatctgccggttacttgctttcccgcagagaagtccntcnnganaccnnaaagtcctttttcttttgt

SEQ ID NO: 24 - DNA, 457 bp, Homo sapiens
  misc_feature (1)...(457): n = A,T,C or G
gcagtaaggctggngggcagggggnccacacctgtaatcccagcacttcgggaggcagaggcgggcggatcgcgtgaggtcaggagttcaagaccaacctgctcaacatggcgaaaccccgtctctactaagaatacaaaaattagccagaaagaaaaaattccgagtcctcaccttggcaagatggaggaaagaaaagcttttgagggggaatgagatgggacctgccagtgctttctctcagacagtgctgggagggctcttctgagatcccatctcccattctctagtcaagatcactggctcctgcctgggtcctggcactggctggatgaagtctcagaatttgctcctgcccccaggcagaggccctcatgcaaatttgagctgtttccagtgccttcagccagaagtccattttgcttggnggtggacccttcttttcttcttggatggc

SEQ ID NO: 25 - DNA, 267 bp, Homo sapiens
  misc_feature (1)...(267): n = A,T,C or G
atctatgcagattagctctctgcccttcctttaataactggactcttggagcatctgattgacagagatggggtttcgccatgttgcccaggctggtctcaagctcctgaactcaagtgatcttcccacctaagccncccaaagtgctgggattacaggcatgagccacgactcccagcctgaaatntannattntaatctntcagcttgtaantananaaaaanngtncggngagncnanttttngttnnntnttaatcccgcctt

SEQ ID NO: 26 - DNA, 346 bp, Homo sapiens
  misc_feature (1)...(346): n = A,T,C or G
tctttttgctcctncattaagtccgaactgnnaatagggaaatttggatgcagagacacagagaaaatgccatgtgaagatggatcagagacagaagtgatgcggctgcaagccaaggaatgtgaagaatggccagccaccaccggangctaggggagacgccagcacagattctccctgagagtatccagaagaaaccaaccctccaacacctggatttcagacttctgaccttnagaagtgngagccaattnancatctgtagtgntttactcttcctacctnaaanntataaaaatatnttnntctcnccccacccttttntttcatnttcttttctttactc

SEQ ID NO: 27 - DNA, 502 bp, Homo sapiens
  misc_feature (1)...(502): n = A,T,C or G
taacatatttaagagatacggagcatcactagcagtactaaaaataaagttaaaagtcgttgacactaggccgggcgcggtggctcacgcctgtaatcctagcactttgggaggccgagatgggcggatcacttgaggtcaggagttcaaaaccagcctggccaacacggtgaaacccagtctctactaaaaatacaaaaacattagccggatgtggtggcaggcgcctgtaatcccagctacttgggaggctgaggcaggagaatcgcttaaaccttggaaggggggggttgcagcgagccgaggtcacaccattgcactccagtctgggtgacagagcaaaaccagtagcagaggaaagagggtgaaatgcagaaaatgactaatgcttttcatagtaagnccgctatccatttgntttttnaaacaanctatctnngcnttnaaagnntttttttnaantaaannnattttnnnagcctttccatnaaaaaaacagggc

SEQ ID NO: 28 - DNA, 104 bp, Homo sapiens
  misc_feature (1)...(104): n = A,T,C or G
tancatatttaagagatacngagcatcactagcagtactaaaaataaagataaaagncntngacactaggccgngcgcgnnatgaccttttgagcaagttcagc

SEQ ID NO: 29 - DNA, 260 bp, Homo sapiens
gcactgaataaagaccattccttcaagcctacgtggaatcatgagccacacagagtagcatcgccagagggaacagaaagtcctcacttgataccggcagaaacaggaacagggttaggtagtctccggcaggctggtcagttttgatctttacaacttgggttgatgatcacctcagccctaccttcaaaagcgattcctgtccacaggggttggtaactgccttcccctttacacaaaaaacaagaaaaaaaatggtg

SEQ ID NO: 30 - DNA, 425 bp, Homo sapiens
  misc_feature (1)...(425): n = A,T,C or G
ttcccaagaagcctccaggttgagctcctgacttgcggaccctgaggcagtgtggcagggtgagaggacacaggctctggagttcccgggacccaagcacagtggctgcaacttcctngcgttggctgtcaaaaaaggaaacttaagcagaaatgcccagctgtgatttctcttctccaacttcccgtgtttgacgtgaggtgtataggctggaaatgccagctccctggctgctgaaggagagactctgcagtctctcctttgtgattcttgcagctgctgaaagataccatgtcttcagtgccagaggatcaacaaagaaaaacaacttggcctcacatgataatgaccccaagtggttggtcaagaaaaagaagtggcaatgaatgaacagattatacatttctttgaagaatttgactgag

SEQ ID NO: 31 - DNA, 533 bp, Homo sapiens
  misc_feature (1)...(533): n = A,T,C or G
cattaagtcagaatgagaccggcgctcagtgagtgcatgagtgagttagcggntgaccagcgactatncancatgaatgaatgacagactgaatgacatgaagcctggagtctcaaggccgagactgcaaaagaagagtccatcctcctatcccctctgctctgaactctcttcatgatcctgaaggtgctttggcacctggagactactngagccagccttgccggggttctaatctgaactcagatcacttcccagctgtgtaactttggacaagttcttaacctctctgtgcctctggtcccttctctgtaaaagtgtagtcatcnggcctggcgtggtgggctcacgcctgtaatcccagcactttgngaaggccaaaggcaaaaccaaatcacttgaggttcangnagtttttaaagaaccagtcctgccccaaccantggnttgaaaaacccttntttttntnactaaanaaacaccaaaaaaattaacccncnttgttangggggcaancccccctttataattcc

SEQ ID NO: 32 - DNA, 337 bp, Homo sapiens
gatttaagaagcaaacagaaatagagccaaggatggagaaactgaggccacctgacttgccaagctgcgacttctaatcctcttggctaccccactggtctggttcaacctgagctcgcactgatttttttggatttgacgtcaaggcaaacatcattgcaaactcaattccagcatgccagctccagagcaccgtaacctttaaaaacttgggatttcgccgggcgcggtggctcacacttgtaatcccagcacttcgggaggccgaggcgggtggatcacctgaggtcaggaatttgagatcagcctgcacaacatggtgaaaccccgtctctac

SEQ ID NO: 33 - DNA, 274 bp, Homo sapiens
gtggggtctttcaatataactgctgtcctcatgaaaagaagaaaacatcgtatgaagacagagatgcacagggagggcgctgtgtgaagatgatggcagaggttgcagagatgctcaaagagccaagaacatcaagggccgccggcaccaccagaagtcaggaaaaggcaaagagggttccactcagagtcttggagcatggcctcccgatgccttgatttcagacttctagcctgcaggatgataagacagtaaattcctgcagttttaagcc

SEQ ID NO: 34 - DNA, 290 bp, Homo sapiens
acacagcatcatctctacccataaaagatggcattctgcaagactgagaagatgcccacctccattcccagagtccaggccttcattaactcacacgagaactacagaagcatcacccctagttctcctattagtcactcctcctcaactgcctctaatccatccatccatctatccggcatgggtcatgtaaagttacagctgagaaggtactccctctcttaaactcgtcggggctccatgtggcttcaagattgaaaataaaactactgcgtatggtatataaactt

SEQ ID NO: 35 - DNA, 384 bp, Homo sapiens
gagaatgataaggggagagagtaagaaagcaatgagatacacatgtcttgactgcttctcttcatgctgaaatcctgggggaaagaagtgctaaatcagttgaggacatgggaacatttattctggaagaaatttgggtacagagacagacaagcaccaagagaagatgatgtgaagaagcacagcgagaacaccatgtgaaaatggaggactggaatgaagcatctacaagccaggaaatgtctgaggctaccagaagccaggagagaggcctggaacagatcctgcactagaaccttcaaagagagcatggtcctgctgacatgttgattttggacttctggcctccagagctgtgagaataaatttcagttgttttaagcc

SEQ ID NO: 36 - DNA, 516 bp, Homo sapiens
  misc_feature (1)...(516): n = A,T,C or G
ctggggctcaaaaccgantcggctggcttttggcctaggnttaaaanggctanccntgatcntttaccaacntccctgntttccgcnttttttggggggaggacnaccgcttcctgaaccagttctgggtttccactttattcaaaaagggggaagttcaagccttttancaaatatccggctgggatcaatgatatttcattctggggtgccctctggaaaattacccccaaaaatgattttctatgacttaatcccgaacaatttggagggaaaacctggtgggaaaaagggtgatctcatagacaaagnttggtncattccaaagacgccccaagaaccagccactgnttcccgcatnacgttcccggcccattgggaacggacttttntncccaaaaaaaaggtcaaggccccattccnccaaggcctttgcaaggaagnttgcaantcccaactttttttgggtgttggnangggcaaggtttnttgatgtcancaccttttactttaagg

SEQ ID NO: 37 - DNA, 481 bp, Homo sapiens
  misc_feature (1)...(481): n = A,T,C or G
ttatgatggatttattgggacataaccccattctaagttgaggagcatctgtacatgtataatggaattgcacaaagaagtgattgcagatggtggaagtcagatttctcaatgttgcagtggtaagttacaataggcaaaagggagggggctanaatgatctttagtgatgaattagaattggagacatcagtatgactcttatttagcttaatgtaggtacaaaaggtcacctattaaaatatttatgaatgtgactatatacatgggttaatatgtaaacatgttacttgctctgtcagctgaaacgacctaaaagtaatgactcttgtactcccagtagcaatgagcactctcagtgcccagatcttggcttttaatatgtttccccaataaaaggaaccagggttccttggaaaatggccaattctaaaattggggcaggaaatatgtatgatgagttggagtatattcttatgcc

SEQ ID NO: 38 - DNA, 491 bp, Homo sapiens
  misc_feature (1)...(491): n = A,T,C or G
gacaaactttgcccaaggagaagctcaatggactgttgacctcttgtgaatggagatcatctcatctaatgtatttttctccacaaacagaagtaatttaaatgacatcttggcagagtagccaataatcaacaatggccacttcttccactcccaagttggctgaattgcaatgggacgatctcggcttaccacaacctccgcctcccgggttgaagcgattctcctgcctcagcctcccaagtagctgggattacaggcatgcaccaccacactccgctaattttgtatttttagtagagacggggtttctccatgttggtcaggttggtctcggacccccgacctccggtgatccgcccgcctcgacctcccatagggctgggtttacaggcgtgaggcactacgcccggccataatttttaaacatttttctgttggcacctgcccggaccatngattttaaatgatctacttacatgatggggaag

SEQ ID NO: 39 - DNA, 323 bp, Homo sapiens
  misc_feature (1)...(323): n = A,T,C or G
gtctctccaattccctcagctatccggggttacataaatgaactcatcactagaggcctgcaccatcttcctgctgccctgcagcccacaggattaaacacaaccaaagtccctgcctggagaaagaggagctgaatcacacacctcaggatggagagggtcttcagagaaaggaaattctcattggggatgaaaatgttaaaagctagcccaaagcacactacgtacatgcaggagttgcctaaaagcacatatgattaaaaactccaaagaaaacgcaaacncttttggatttacgatactgtaagatagctcccacctct

SEQ ID NO: 40 - DNA, 496 bp, Homo sapiens
  misc_feature (1)...(496): n = A,T,C or G
gtatattattaaaagcgatgattgtggaaatttctgtcttattactgaacacagaggaaaacaaaatcttcctgattgatgaaaaaccagtgttgtatttgggtaagctggtgacaatgactccaaagatcatccagaaccttcacaccaaggagggattggctaaccatggactgaaagaaggggacaactggatgaggagctggtaaagccagaaaatctcaggcgtgtgctcaccanggtgacagatgagaccttctgatgctctcttgcccgtgcacacttccattctctgagtcttttgggtcaagatctgagctttcagggagcacaccaatggcatgaacctctctgatgcctctgagcccagccttagcattctcttcttcatgagctactacctgtctacagcagccaacaactcttctgtcaaactcttgggtctatgccanggtaaaaaccataaagnactgcaggtggcttaaccctttgagga

SEQ ID NO: 41 - DNA, 331 bp, Homo sapiens
aacctctgtccatgagcaatggatgacctcaggacaagaatgcaataacttggcctgatgttgtgaagtcacggtccatccagggatgggcaagaggatgaccagaaccatctcgagaggggctggaaagctgcctcacgtatgtggtcctgtgctgtgtctacatgttcctcactcgcctctacaacgctcatggcacgagggaggaaatggggtgcagaggctaaggaacgtgcccaaagccctacagctggtgtattagtaatctactgctgtgtaaccaattgccccaaaatttaaatgtgtaaaacaacaaagacgtctaactcat

SEQ ID NO: 42 - DNA, 238 bp, Homo sapiens
ggagggagaagatcccatagcagctttgcagtcccttactgatttatgctctggaagataagacacgctttgcaagattcagctgacgcagacctgctgtgtcatattactttctttgtcttgctggaaagaagtgcaaaatacctaaggaaacctccttgtggcctccattaaccccagctagcacctaccaaatcagcaaaatccgaaatatgatttaaataaattatgcttaaag

SEQ ID NO: 43 - DNA, 565 bp, Homo sapiens
  misc_feature (1)...(565): n = A,T,C or G
cctgctttaattcanaacttgaaggacatggncccgcggagggagaagattcattcgnccattgaccccgaggganggntttntnacttccgccgccctgggatgcggggcttcttttnttcttccaacacattcttggcttcattcatgggcccggaagaatcttggcnaatggcccaatgtcccccccagattcccccagaangggttcacccagaatccctaaaaccatgccgaanggaaagcttcccatcaaaaatttggtcaagggcnatatcatcaaagggaagtattgccacgaagaaccaatcgggggggaacnggcccgggangccccgggaagttttcccggggaagaaacgaagccaaaaaagccgccantncctgggggcctttgcttgggaagaaaccttttctaaaaaanggccaccctttgggccccttgccgccatcattgggacctttttttcaagcttttcccttccccaagggaatcaaagttttctttaccaccaaacttcnttgtgtnggcntttttggggaccaaaaatttaaaaagctttag

SEQ ID NO: 44 - DNA, 684 bp, Homo sapiens
  misc_feature (1)...(684): n = A,T,C or G
tgggggggagcttaccttggcattttaaagttcaanaacttggaggggtttggaggggtcccagtttaccttggcaaccattccaagttattttggaaaaaaaggaatggaattttttggcttttcattttggcaccttggccctttttggcttttctttcggtccaaaaaggaattttcccttaaaaggggaaaaaaatggggggccacccacccaagaaaattcccttggggaagnaaaatcctggcttcccaaaagnaaaccttggattaaccccaaaagnaaattttggggattcttggaagnaaggggtaagnaaaggggaaaatgggaaattccggtaaagntnggggaattgccttgccattttggtccttaccaattcttccccttttaagggaaccttccaaaaaaggaacctttttaaggttccttttccccaaggggtnggccccaagccttggaattttaaccccttccccaagnccttggttccaaaggggcccctttcccctttgggggaaaaaacctttggggggcctttccaaaggccttttgggaaaggaaggnaaaacccttgggggcctttttaattttnccccnaaggnaaattcnaaccaaccttttnccccnttttttnccctttgggggggggaaaaaggttncctttaaccaatttttcc

SEQ ID NO: 45 - DNA, 259 bp, Homo sapiens
acatgggggtctcactgtgttgcccaggctggagtacagtggctattcacaggcacgatcattgggtacaatagcctggaactcctggactcaagtgatcctcttgcctcagctttcctagcagctaggactacaggcttgtgccactgcatccaacgtggacccccttttgtatgccacaatctatccagtgcctttcgctaagctttgcaatttccctcctatttgtaatattaatggtttatactttttgatttat

SEQ ID NO: 46 - DNA, 346 bp, Homo sapiens
gacaaaaacaatgacagacttgtccgagctaccatcgaagtcttgggtctgcacgcaaaggatggaatcccccatctccattcccaaaagtttccctacgggagcctggtgttgtctcctccggaactgtcctcgcggctgcctgtttttccctagccatggttactgcctgcgggggattcagcctgtgaaggcagtcaaggcagttcaccactgtcatcaaacctacacccctgtgtgcatgcgcacacacacttgtaacccagtggcacaatgcaggaattagggaagcaaaggcaaatcgctgaatagctagggcacctgatccctgtaagggcccatcaag

SEQ ID NO: 47 - DNA, 203 bp, Homo sapiens
atcaatgaaacaagaacaaagaggagaatcaggaagtcagcagtatgtctcctttattcccctatgctttagagtgagaagaaataccagaatctggaaccaggaagtgagtcctctagggatgaggaggtattcagctggatggctttttaaaacatttcctccagagtcttctgcctgattaaaaacagttttcgtcctag

SEQ ID NO: 48 - DNA, 213 bp, Homo sapiens
  misc_feature (1)...(213): n = A,T,C or G
ctgagatcaatgaaacaacgaacaaacgaggagaatcacggaatgtcagcangtatgtctcctttattcccctatgctttagagtgagaagaaataccagaatctggaaccaggaagtgagtcctctagggatgaggaggtattcagctggatggctttttaaaacatttcctccagagtcttctgcctgattaaaaacagttttcgtcctag

SEQ ID NO: 49 - DNA, 341 bp, Homo sapiens
  misc_feature (1)...(341): n = A,T,C or G
gatcaaagccatcaagctacaaatgatcttacaaatggaacctcaaatgagctcagctcacggcttctaccgaggacccctggatcaacccgctggtccctcaattaccctagaaaattcccctctggaggacaccaaactgcagggccccttcttcacccctaaccagcaggaagtagccagaacgactgccacacggttcccaacagcagttggggtgtcctgtttagaggcaggactgagaggaggtgccagctgggcttcctgggtcaaggaagggggtnaaaaaagctgngaaactcactcatttcctgcatcaggacttacttcagtcctgtttt

SEQ ID NO: 50 - DNA, 337 bp, Homo sapiens
  misc_feature (1)...(337): n = A,T,C or G
acaaagaagtctctgcccagggtcgttgcttttaaagatattctgatgcaaaatgccagtactctgctcctccattctacagatcaacaaatctttctacagccaggtgcagggggctcttgcctgtaatcctagcactttgggaggccaaggcaggcagatcacttgaggtcaggagtttgagaccaacctggccaacatgatgaaaccccatctctactaaacatacaaaaacattagctaaacatggtgtcgcacgcctgtcgtcccancttctnnggangnttgaggcaggaaaatcncttgaacctgggaggtggaggctgcagtgagctcc

SEQ ID NO: 51 - DNA, 308 bp, Homo sapiens
  misc_feature (1)...(308): n = A,T,C or G
gtttcagcagagcagctttaccatttgggctggtgaggcgagaattatcctgtgaaggttattctatagatctgcgatgcccgggcagtgatgtcatcatgattgagagcagctaactatggtcggacggatgacaagatttgtgatgctgacccatttcagatggagaatacagactgctacctccccgatgccttcaaaattatgactcaaagggacatctctgaaggtctctgccaactccagagctcccgccctgaggaatttgctgggcttttgttgcgantgnctngaagttcgccctttaa

SEQ ID NO: 52 - DNA, 331 bp, Homo sapiens
  misc_feature (1)...(331): n = A,T,C or G
gctggagtgcaaaggcgcgatctcggctcactgcaacctccgcctcccaggttcaagcgattctcctgcctcagcctccagaatagctaggattacaggcgcatgccaccacgcccggctaatttttgtattttcagtagagaaggggtttagccatgttagttagccaggctgatctccaactccgacctcaagtgatccgcccgcctcggcctcccaaaatgctgggattacaggcatgagccaccgcgcccagccccaggcaacatattttcttaaggnancttttaanaaggccatgcatttccacatttccacacctttcattact

SEQ ID NO: 53 - DNA, 322 bp, Homo sapiens
  misc_feature (1)...(322): n = A,T,C or G
tttttagcctctgaattaagagttctgcataggtagccatggtgaagtctggaaacacgttctcagtgcctcaaccagcagctacaagtcagagtcaagcccattatgaccccttcttcctgcctgagctttggccccagatattctgagaggggttggatcctccagggcatcgacctcacagctctgtcttctgtcctgagctcttctcctggcatgtaaattcaggactcagataagccctgcccttcatagccaccttggatgctgcgtgactacctgngaatcanggaggactggaaaagacattagggagggtacc

SEQ ID NO: 54 - DNA, 330 bp, Homo sapiens
  misc_feature (1)...(330): n = A,T,C or G
atttctggaaataaattccagaataagagttcatcctgccgatccagagccacagtttggagacgctgcattcctagattgaaggcctggctcctggtggacagccttctctctaaagctactctctccaggttctggcaactgcagccaaagggccaaagtgtatgactcaggagtgttacttgaattcctggaaccagctatgcctgaagtcaatccattccagttgcactttcttcattctaaatctccctgttctttcaaggatgcctgggttgcgaacngggnttccnggangggtaatgacaaagnggcttattccccataaat

SEQ ID NO: 55 - DNA, 325 bp, Homo sapiens
  misc_feature (1)...(325): n = A,T,C or G
angcaaaacatcgcatctttccattttataggacaatgccaactcctgaagatcttgctctaagtggtcaaagggtgagcatactgcaggcaacaaaagatcgagcatactacaggcaaccaagggtcaagacaaatttacaggatccctccctaccgtggccactacccagcttcccagtagtgccttcctaatttgctgcccatggtaatggagacaaatacctgcagaagaacataatcaaaactcaaaggaaagtaaggaggagcaagtttttttaaaagggattccagttggcaatcctcttgttactaattcttgttga

SEQ ID NO: 56 - DNA, 330 bp, Homo sapiens
  misc_feature (1)...(330): n = A,T,C or G
aatccccaaactcaatgaggacacgttttcctcccgagaacagcagaatggtaacaaagaacacatgaaaagaaaatgctttcaaggaccaaaggaattcatctacaaatatggaatttccagcatggaagtcagtgacaaagccctggcatacccccatcgcaggtgtcgtgagaacaccgtccagtgggacgaggccagccctgccctgagaagctgagattcccaccctacctggagggagctgagcaccctcacagcaactctgagcccctgacttcaaanggaaacttttttcctgtggtatcagacgtagagggcgggctcttt

SEQ ID NO: 57 - DNA, 199 bp, Homo sapiens
gtggcatgatcatggcttatcgtagcctcaaccttctgaattcaagagacactcccaccttagcctccctgagtaactgggaccacaggcatgaaccaccatgcccagctacctttaaaaaaatagagagagagacagggtctcactatgttgttcaggctggtctctaataaattgttattaccaatgaaaaaaaaaa

SEQ ID NO: 58 - DNA, 419 bp, Homo sapiens
  misc_feature (1)...(419): n = A,T,C or G
actgagttctttgccttggaacacgacgaggaccttctccttcctgagaggggacacgcctttcatcatcttctgctaagaggcgcccctccaccaccctgcatgagtaagacacagcctccctgcagcacagaggaggcttntgtgagtgcccanggcatcaccaaggtcagggagaacctcttgaggtaactngcatttgtgtcacgaagccgaanagggttgcaggggattgcgtgatccccatcctgntcatgggccaccaccccantccactcanaagataaggcctcctngatcanatncaatgactcattgcatgttatccccgcacttttanaagcttangtnggcccgattggctgaaccncattantttttaagaccatncctggccaanaatggnggaaccccatttt

SEQ ID NO: 59 - DNA, 280 bp, Homo sapiens
  misc_feature (1)...(280): n = A,T,C or G
ggtttcatcatgttgtccaggctggccttgaactcctgggctcaagcaatcagcccacctctgcctcccaaagcgttgagattacaagcgtgagccaccattcctggaccctcgtagtttttctggagcctcgtgatntgatatgatcttcctgccgctgattcctcacagtattggcttgccacacctccaggggcactgatcacattctacctggcattatttcatctgagtncctgncctancccttctgcccattagactgtaaccttgtttaggc

SEQ ID NO: 60 - DNA, 359 bp, Homo sapiens
  misc_feature (1)...(359): n = A,T,C or G
aatggagctaccacatggtcaggaggaagagactcacaaagaaagatgaaggttgcagagaggtgctatggaaatagcacatgctaaaggagtcttctaagcagcccanaggcgatgacataccagtgccagcagaggaggagaaccacgcttcagtataacaaaaacttcnatgaatcatgcncaatgtggaaaagtcgaatagacatggctgaggataaaagaaaagaacgtacacataatctcactacccagagagaagcaatgttgacatatttctcttcctcaatgcatatttatatattgttgatatttttactgtctgtgcaattttgctttaattaaacatttagattatg

SEQ ID NO: 61 - DNA, 70 bp, Homo sapiens
  misc_feature (1)...(70): n = A,T,C or G
nantcattatgnntnctgtttncctggatggactccgactganagatanacgccattgacgcatactcgg

SEQ ID NO: 62 - DNA, 178 bp, Homo sapiens
  misc_feature (1)...(178): n = A,T,C or G
cttgattacagcagcntgatgctttgcctggataaacaaangctctnngcnaggaagagactttnggaccagcaagagactagantngaaacagagtttaaacaagcatcataacccctgaagcnaattttatcatgatttcaatttgcatattaagaaactaagatttggaaaaaaa

SEQ ID NO: 63 - DNA, 167 bp, Homo sapiens
gtgaagaatgaaggaacattccaggatcaagtttcctaaaatttggaaataaactgtggaaattctcctaagtttagggggagacagaaccacctagaatcactgacaccttgattcaacacaatccgcagaccgggtgattaaataaagcactttggttttttcat

SEQ ID NO: 64 - DNA, 435 bp, Homo sapiens
  misc_feature (1)...(435): n = A,T,C or G
gggcattcaagataagccatcatatcccctgtggcctgcacgtacacatccagatggccggttcctgccttaactgatgacatttcaccacaaaagaagtgaaaatggcctgttcctgccttaactgatgacatggtcttgtgaaattccttctcctggctcatcctggctcaaaagctcccctactgagcaccctgtgacccccactctgcccgccagagaacaacccccctttgactgtaattttcctttacctacccgaatcctataaaacggccccacccctatctccctttgctgactctcttttcggactcagcccacctgcatccaggtgaaataaacagctttattgctcacacaaaaaaaaaggnngggggggncnnnnccnattttgggttnaaacnnnngnanttntttttaaaaggggggggg

SEQ ID NO: 65 - DNA, 355 bp, Homo sapiens
agctggagcctcactttttcacccaggctgaagtgcagtggtgtgatctcggctcactgcaacctccgtctcccgagttcaagcgattctcctgcttcagcctcctgagcagctgggactacaggcatgcaccaccatgcccagcttatttttgtatttttagtagagatggggtttcaccatattggccaggctggtctcgaatcctgacctcgtgatccacctgcctcggcctcccaaaatgctgggatcacacgcgttagccaccgcacccagccttatttacctattaaagagcatattgattgcttccaagtcttaacaattatgaataaagctggtatggactttcaca

SEQ ID NO: 66 - DNA, 340 bp, Homo sapiens
  misc_feature (1)...(340): n = A,T,C or G
gatgtggcagaagtgaccctatgtaactcagaaagacccaaccttaagagcttctgctttcctgcttggaacaccccctactgaaaaccagctgccaaacaaaagggccaccatgctgtgaggaaatccaagccagccagtgaagngaatagtcacatgaaggacgaccaaggcacagtcatatgagtgaagccttcttgaacattccagcctagctgtggatgaatgcagcaaagtgagtgatccagtcaacgccataagcaacagaagaacagcccagccaagccctgcctgaattcctgagccatgattcataagcaaattaaacagttattgtttc

SEQ ID NO: 67 - DNA, 439 bp, Homo sapiens
  misc_feature (1)...(439): n = A,T,C or G
gtatacgcccagatggcctgaagtaactgaagaatcacaaaagaagtgaatatgccctgccccaccttaactgatgacattccaccacaaaagaagtgtaaatggccagtccttgccttaactgatgacgttaccttgtgaaagtccttttcctggctcatcctggctcaaaaagcacccccactgagcaccttgtggcccctactcctacccgccagagaacaaaccccctttgactgtaattttcctttacctacccaaatcctataaaacggccccacccttatctcccttcgctgactctcttttcggactcagcccgcctgcacccaggtgaaataaacagcccttgttggttacacaaaaaaaaaagggccggnggggccanttaanntgggantaaacnaggnngannttgntnaaangggggggaccccca

SEQ ID NO: 68 - DNA, 347 bp, Homo sapiens
  misc_feature (1)...(347): n = A,T,C or G
ggtctctgtcactgaagctggagtgcagcggcgcaatcacagctcactgcagcctcgacctcccaggttcaagagatcatcccacctcagcctccctagtagctggaactataggtgcacgccagtatgcctggctactttttgtttttatagagacacaatctcactatgttgcccaggctggtctcatattcctgggctcaagccatccacctgctttggcctcccagagtgctgggattacaggtgtgagccaccatgcccagcctcgaatttcctctacttggcctgaagcagaaagccacagacaacagagacctaagctnctaatgaataaagaacccccc

SEQ ID NO: 69 - DNA, 328 bp, Homo sapiens
  misc_feature (1)...(328): n = A,T,C or G
gccctgcactcgatggatcagctggcaccacccagatcaataaactggctcatctggtcttgtggcctccatccaagtaccaactcagtgcaagaagacagcttcgaccccgtatgatttaatctccaacctgaccaatcagcactccctactccctggccccctacccaccaaataatcctcaaaaaaacccagtctccaaattttcaggaagactgatttgagtaataataaaactctggtctcccgttcaaaaaaaaaanggccagngnggccanttnanttngnanttanccnggntgaanttgntnaaangggggggcttacc

SEQ ID NO: 70 - DNA, 386 bp, Homo sapiens
  misc_feature (1)...(386): n = A,T,C or G
gccaaacatgatgactcacacctgtaattgcagcactttgggaatccaaggccggaggactgcttgagcccaggagttcaagaccagcctgggcaatacagcaagaccccatctctaccaaaaaaaaatttaattagctgggcatggtgctgtgtgtatatagtttcacctactcaggaggctgagatgggaggatagcctgagtccaagaagttgaagctgcagtgagctgtgatcgcaccactgcactccagccttggcaactggggaaagaccctaactcaaataaaatttaaatatatatatacacacacacacatatacacacacacacacacacacacacacatatacacatgtatnttttgtaataaatggataaacac

SEQ ID NO: 71 - DNA, 459 bp, Homo sapiens
aaactgcacctcactggctgggaatgaggatatcttatggaagattcttatttttggaactttttgaactctctctgttggcttctgaaagctgaatgctctttcaaaggacctgaagatttcttttgtcctcagttacattgagcccacatttatgaggcactggtaaaacatttctgcaggagggagttatgtgcattgttcctcttagagaaacattgctcacactaactcctgactgcatgcattttgcaaatgcacagctcagtgagtgtgtcttcccgttgtttgtggtttacaatcctgcaagaaatggctttctatgaggcaaaatggataatggccttttattttaagttacaaagagttgggtggcaagggggtagggaaggcaaccctaaatgctttgaatgaattattgaattgacatggtccaaagtgacatttctttttaaaatg

SEQ ID NO: 72 - DNA, 528 bp, Homo sapiens
gtaccaggggaatctatacctgaagcattactggagtcaagaaatttgactatggtgttgctgggcatgtgtttccttgagtatattatgattggaattttcccaccttcttgcattttgaatatatgccagcatttctccaagatgtatatcctagagcaaaatttctgggccatagacagagtcttgctctgtcgcccaggctggagtgatgaggcccgatcatcactccacctgggctcactgcacctccgcctcccgggttcaagcgattctcctgcttcagcctcctgagcagctgggattacagagcccctgtcatccagactggagtgcagtggtacaatcccggctcactgcaacctccacctcctgggttcaagcgattctcctgtctcagcctctcaagtacctggaattacaggcatgtgccaccgcaccccatgtaatgtcccgatcttgatggatgcactctggttatagaaatgtcctcattttaaggaaatacatgccaaagtaagtaaaggc

SEQ ID NO: 73 - DNA, 296 bp, Homo sapiens
gttcaactcattgccacttcctgtagctgtcttagtgacccttcaggccagaagcagatgcctgtgctgtgtaccatgcccctcctgctgctgaactggagagaaaacgtggctggcagcttttgtttcttgagaagttccgaatcttttgcatctggtgctgcgagaaggttcacctggttaaacatcctcaagtcagcagcacagctccttctggaaggcactttaactggatgggatcctctcactgtagacattgctacctccctttcctgaaataaagcctgctccagagc

SEQ ID NO: 74 - DNA, 410 bp, Homo sapiens
  misc_feature (1)...(410): n = A,T,C or G
gatgaatggtcagagctggtcacaagctgaaggtggctcctccagtggctctcacaaacccaaccccctccatgtcatcgcaaaggctgaggagatcagtatttcaccacacctttgtgcttcacttaggtatcgcaaggaaggaaaactgtctccatctgaagaggacatagccatgtatctgctttgttctcttcttgatttccacgttccccaaaatgggcagggctggcttaaaaagcaatggagaaaaagttctggagatggatgatggtgatgttctcacaacaatataaatgtacctaatgctacagaactgtacacttaaaaatgcttaaaatggcaaattttacnttatgtatttttgactctctgtctcccccaaaaagcaatgaaggctcttccttttc

SEQ ID NO: 75 - DNA, 357 bp, Homo sapiens
  misc_feature (1)...(357): n = A,T,C or G
gggcattcagataaagccatcatatcccctgtgacctgcacgtacacatccagatggccggttcctgccttaactgatgacatttcaccacaaaagaagtgaaaatggcctgttcctgccttaactgatgacatggncttgngaaattccttctcctggctcatcctggctcaaaagctccctactgagcaccctgtgaccccactctgccgccagaaaacaacccccctttgactgnaattttctttactacccgaatcctataaaacggccccccctatttcctttgntgactctttttttggacttaagcccactgnattcaaggngaaataaacaagctttatttgttacacc

SEQ ID NO: 76 - DNA, 219 bp, Homo sapiens
tgaccttgggatctcctgaaggaaaagcattggagtagaagtaagagctgactgtgaaagcctgaggaggagctgccttattgttaaggggtagcaagaagcccaggcgtggcagtccacgcctgtaagcctagcactttgggaggccaagatgggaggatcgcttgagctcaggagcttgagaccaccccgggtaacatagcgagacctcgtctctac

SEQ ID NO: 77 - DNA, 401 bp, Homo sapiens
agttgagaaatagacggtccacagcggacaacttagaatggaataagggagatgtgtttgaggcactaccattggaagatgtgctggggagaagcccagcccagcaacatgcggcaggaccacatctcggcagagctgaagacagagacgttgcagcgacaaggacaactggcatgcctcacattcctcagtgttgaaaacaataaaaggagggggaatgagagaaaaatcaaatttctacgaagagatgtcagcagtaaatttaatgcaggtgcaatattctccaaacaaaggacgttttgtttctaccgtctgggctctgtgaaaacctgctccacctcctccttgctatgtgttttcctttttatctgtgtaaggtagattaaaatgttgataccctt

SEQ ID NO: 78 - DNA, 387 bp, Homo sapiens
  misc_feature (1)...(387): n = A,T,C or G
ctgaggactgtatcgagntacaaacgtcaccagcaatgaatgaaagtagctgatgccccacatcctcaccagagtgagtttcatcactaagacaaagcaaaacagccggaagcagtgactcatgcctgtaatctccacactttgggaggccagcgagggcggatcacttgagctcaggagtttgagaccatcctgggcatcagacctcatgtctacaacggaaaaaagacatttagccaagcgtgttggtgtgtacctgcagttctagctccttggggggctgaggtgttagaatggcttcagcccgggaggttgaggctgcagtgagctgagccgtgatcgtcccgctgcactccagcctggatgtcagagtgagacccttgtctc

SEQ ID NO: 79 - DNA, 331 bp, Homo sapiens
  misc_feature (1)...(331): n = A,T,C or G
aataaaggcaactgctgggtgtgataagctcgtgcctgtagtttgggaggccaaagcaagcagatcacttgagccccggagttggagaccagcctggataacatcgcaaaatcttgtctctacaaaacagacaaaaatgaggatcgcttgagcccgggaggttgaggctgcagtgagccacgtttgagccactacactccagcctgnataactgagcaagaccctgtctcaaaacaaaacaaaacaaaataaacaaaaaaggccagcgaggncnattcagnttggacttaaccaggctnaacttgctcaaaaggnggggactacccaggaa

SEQ ID NO: 80 - DNA, 151 bp, Homo sapiens
agtctcgaactcctgaccttgtgatccacccacctcggcctcccaaagtgctgggactacaggcatgagccaccacactcggccaccttcactgattttttcctttcatatttctctttataagtcttctattaaaatgaaaatgcttcag

SEQ ID NO: 81 - DNA, 305 bp, Homo sapiens
aaaaaggaaatgtgatcaacctaaacaccaagggaagactgtgcatcatctcatccacaagacaaacaaaatgcctcttccagctttgttacaggaaaaatcacagatcaataagaaaagctgatgagaaaacaaagcaaccagaaaaaggtggcaaacccacactgtgtatattgagaaatagaactgtcttcaattagaacaacagatttgccataatccataaaattcatgttatgagagtttgaagcagttatgtacaatgttttatactacaaagtagataaagaccctccatcccacct

SEQ ID NO: 82 - DNA, 329 bp, Homo sapiens
  misc_feature (1)...(329): n = A,T,C or G
aataaaggcaactgctgggtgtgatagctcgtgcctgtagtttgggaggccaaagcaagcagatcacttgagccccggagttggagaccagcctggataacatcgcaaaatcttgtctctacaaaacagacaaaaatgaggatcgcttgagcccaggaggttgaggctgcagtgagccacgtttgagccactacactccagcctggataactgagcaagaccctgtctcaaaacaaaacaaaacaaaataaacaaacaaaaaaaaaanggccagngaggccaattnagntnggacttaaccaggntnaantngntnaaaagggggggac

SEQ ID NO: 83 - DNA, 443 bp, Homo sapiens
  misc_feature (1)...(443): n = A,T,C or G
gaaggacacttctataaaagacggagttggttgtacttcccatgaaaccattattgaagacacacatttgcataacagcaatgagagaaaaagtagattcccgaggagaagcactggaaattaacatacaacataaatgtgtcataagaaaaagttgaaaattgtggcttctaatgagttatctgaaaaacacttaacatgagatacatctctcttaataaattgttaagtgcactggacaatattgtcaattataggcacaaggctgtacagcagatgtctagaacttattcatttcatgtaactgaaactttatactcattagatagcaacttcccatttccacctcttcatggcccctgggaatcacctttctttctactctctgctgctatacatttggctactttagagatctcatacnaataaatagaatcatgtgg

SEQ ID NO: 84 - DNA, 352 bp, Homo sapiens
ggagacaccacctctttgcttctccaaggctgtttgctgcatctgaaaagacaatctggaacaagaggacagtcaggccagccacagtggttcatgcctataatcccagcactttgggaggccgaggcaggtgaatcacttgaggtcaggagttcgagaccagcctggccaacatgaggaaaccctgtctctactaaaaatacaaaaatcagccgggtgtgatggttgcacctgtaatcccagctactcgggaggctgaggcaggagaatcgcttaaacccaggaggtggagattgcagtgagccaagatcatgccactgcactccagcctggtgacagacgagactccgcc

SEQ ID NO: 85 - DNA, 268 bp, Homo sapiens
gtgctgaatccaacagcagtccctactaagcttcctgcacagattctgtttcctggagaacctgatgtacaacagttaaagtgcagagaaaccctctgccaaactttggtgtgctttaaaagttatggcagtcaggctccctttactgtcataactggaacacctttcacttttcaaaagagctggtgtatctgcttgctgtacaactacaaatatatacttttgattaagaaagttgagaaaaaataaaagcagtttaatttagccc

SEQ ID NO: 86 - DNA, 179 bp, Homo sapiens
gtaacccttcagaatgttgaagactgttgtacaaagtaattaatgagctgccctggatctgaggcaagcgacggaagagtcaagatgactaaaagtcttctgataaagggtttctttaaggaaaagaaaatcccacaatgcaaccagcaatgttaatcttcaataaatacgctgttaat

SEQ ID NO: 87 - DNA, 362 bp, Homo sapiens
gactggtgcccttacaaggagagtaagtaccacctcatcagggccaccctcatctaccagagagctctccctctgtccatgggcacacagagaattggccatgtgaggacacagtgagaagacagccatctgcaaaccaggaagagagtcctcaccagaacccagccctgccggcaccttgatcttggacttccagactctggaactgtactaaccagaagttcaagctaggggttggagaaggaaggtcatacatacagaagcaagaacctcaacccctagaactgctatgaaaatcaaacaaaatgctatttgtaagtagtcttcctgtgctggactaaattaaaagaactttgcagctc

SEQ ID NO: 88 - DNA, 431 bp, Homo sapiens
  misc_feature (1)...(431): n = A,T,C or G
tctgactttgagccaggacttgaagcagacactatggctcatgcagaaaagaaacttcttcccacaagactgccagcgaaattttgcagactcaagatgttcggagagtttggacaatcatcacagtttttggacgcctatctgagaccatcttctgtgaagtttattcagctcataagtgtgaataaaaaattgctaaatgtgaactcaaagagacagtgcagttttacatctgagtccactgaatgcatcacagaagcagcatgtgcagcaacaggagtccaatagcgtcaaccaccaggaaacaaggatcacggagcatgtgagaaaatggtaattgagaaggctgatcaaggaacacactaaaattggaggcatgaaacacttggcgaaatggtcccatnggtccatctggggatcctgggaacaag

SEQ ID NO: 89 - DNA, 216 bp, Homo sapiens
  misc_feature (1)...(216): n = A,T,C or G
gtttggaatccaaccaccaagttctgctgaacgaatgattttataatcagctaactctgcccacgatgganagcaaaggccagtttcacagacccaaatacatttggcctctgaacgacatggatttgaactgngaggatccatttacatgtggattttcttctgcctctgccgtcccagagacagcatgaccagccactcatcctcctcctcctc

SEQ ID NO: 90 - DNA, 260 bp, Homo sapiens
tttgcaaatgatttccaaatataatttctcatcggaatctcacaaccaccaaatacgaccaggcattattcatctgattttatagatgaggaaatcaagggtcagagaagtgatgtgacttgcccaaggcccacagatggtaggtggcaaagccaggacttggaatccaagataaagaaaactcagtgggaaggagaagtttgtgattaaatccaattaaaggaatagagtaaaataaagaacacagtaaatttctcacc

SEQ ID NO: 91 - DNA, 265 bp, Homo sapiens
atgatgaaaatgatcctcagaggagcattgttaataatcaaattaccaaagaatgatgcctactctgaatccagatgtctgacttcacaggacaaaaccactgcatttactgttctcaaatgatttattttaagaatttacgcttctaaatttaatccctgagggtaatgggttatgtcttaaaatatgtaatggaacattaaaaaaatgaattctttcttgcttggtttcggccaaaatgtaaataaactgaatatcaaatact

SEQ ID NO: 92 - DNA, 326 bp, Homo sapiens
attccctctgacctgctgcccctggcctttctcctgccccagtggggctttagcacaactgaccgctgctttcctgcgctctgtggccagggaactcatgtggtgaagcactctggagtttggctttgcaaagaagtgaaatctacaatgcaaatatccagatctccaaaccctggtcaaatggcagtgactgaagctcatgccccacctcccagctgtgcaaccttggggcaagtcacttcacctctctgggcttcaacttcctccttggaaagacagaatgccaacatccatcctgcctcttgccaagatgttttatagactgc

SEQ ID NO: 93 - DNA, 367 bp, Homo sapiens
acggagtttcaccatgtcgtctaggctcatcttgaactcctgacctcgggtgatctgcccaccttggcctcccaaagtgctggaattacagaagggagccaccatgcctggcctggagtatataagtgcttaagaaccttgttcaaataagaaggaaccagaaaacccttcgttatagcaattgctctctcttgaaattgctccagatccataacatctctcttcatgttcgggatgtggatttcatgaagatattttgaaggtgctgctgagacaatggggcttttctatataaacaaagtttttattagcttttttgcttatctggattttactgctaattaattaaagcccaatactttttcag

SEQ ID NO: 94 - DNA, 371 bp, Homo sapiens
ctgccctgtgtttgacatttggtgattgtattcctttcctgggacagccgtaacaaaacgccacaaactcagcagcttcaaacaaccaaaatggattctctcacagctctggaggccagaaggccaacactcaaggtgtactgggaccgtgctccctctgaagcccccagggaagaatgacttccttgcccctgccagctcctggtggtggccggcggtcctgctcgctccttggcttgtagacacatctctcccatctctgcctccaccaccgcgtggccttctctgtgtgtctgtgtccagatttccctcatataagggcatcagtcattggactggggccatcctcatacaacatgctgttagccttg

SEQ ID NO: 95 - DNA, 415 bp, Homo sapiens
  misc_feature (1)...(415): n = A,T,C or G
gtcaaatctggatactctctgctgaagacaaccaatattaatgaatcacactacagagtcattgtctacgatcccaaaggaaacaataatgcgagtacaacaaattcttcttgcaagagaaaatcctgcaaaactacttaacagaataacactggtcaatgctctaatcatacatttgttaaaccttatataatgttttcaaatatgcatgcaatccaggtgcagctttaactaaaaattcagtctaattttattttcagtttaggttcttggagcaaacatctttgcataaatatttgcctcactactagcctctctccatataagaaaccatcatttctcttaaaaaaaaaccacaagttgttttatttccacaataggnatctaaaagatcatttttaaaaaaaggcagctt

SEQ ID NO: 96 - DNA, 407 bp, Homo sapiens
  misc_feature (1)...(407): n = A,T,C or G
gtggaggtggggaggagcttttgcangcctgttgaactaagaagctgtgacagggcgtgagatatgtcagcaatgctggtggtgccagaggtttctgaagggtctcactgtggtgcctatgctggagtgcagtggcacaatctcggctcactgcaacctctgctttccggacttaaacgaccctcgatcctcccacctcagcctcccgagtagctgggaccacaggtgcataccacgaagcccggctaatttttttgtgtttgtggtaaagacgggcgtttcaccatgttactgaggctggtctcaaactcctgagctcaagtgatttacacgcctcagcctcccaatgtatattttctttgcttccaaaatgattgttgagagtaaagcttttgatgtacacatat

SEQ ID NO: 97 - DNA, 306 bp, Homo sapiens
  misc_feature (1)...(306): n = A,T,C or G
agtggntgaggaattgtcaattgcttcactaagtaccattaatacggcaagatagcagtaatcagttccacagaagtcatatcattctcaccctgggattgntaagatctagacatggtcttgctgtattgccctcaaactcctggcctcaagtgatcctcctgcctcggcttcccaaattacaggctggacttcatgtggtatagcatttcttaaaagtctcaaagaagtcaactctgtaatataaagtcctcatatgaatngattctaagttgtagncagccactaataaacacacatgcttac

SEQ ID NO: 98 - DNA, 209 bp, Homo sapiens
  misc_feature (1)...(209): n = A,T,C or G
ctgntgcgctcagccttgaacaccctcccgaccttggggctctgctgccccacgcggagcccccatttcaacngatgcagacaccccaaagccccttcccaacagcccgaagagaagccctcctctgaagagacagcagagaagcagagccccctgggacgccccccaagacctccacgtctccccagcacccggcgggggggtggtgc

SEQ ID NO: 99 - DNA, 229 bp, Homo sapiens
aaggctaaagctctataaccattgaaagctggctgggggaaaagaagaagaggcaaaaagatcaactgaagaataaactgctgtcattggcacaaaagaataccacaaagattatttacaaaactcgaatcaggagtagaacagacctccatgtggaagttcaattatgctaagaggaaagaggaaaggggaagagtttacagaaataaattaatgatgatgataaact

SEQ ID NO: 100 - DNA, 308 bp, Homo sapiens
  misc_feature (1)...(308): n = A,T,C or G
atgangtgctgtgctggacaacgctgcctttgggcttcggcttggaccgtggggaggcagagcaatgatgttgttaggattaaatgacaaccagccttctgttatttctggaagattttggaacttccagagaaggcaggagtgagctgtcggggaaggaacgacgtctccttcaggaattgttgccagcacttgggtcatgaagcccttctctgtgtctcctccgactggaatactcatcacgtcctcttagctgataacaatagctgactttaataagtgtagngcttcctatatatgtgtatgtg

SEQ ID NO: 101 - DNA, 339 bp, Homo sapiens
  misc_feature (1)...(339): n = A,T,C or G
ttcatgaaatgggaagattttgctggattatctggttgggctctaaatgtattcaaagtgttcttagaagaaagaggcanagaaagagctgacacacagaagagacggtgatgtgaagacagtggagagagagagatctgaaatgctgcccttgaagactggagtgaagtggccacaagccaaggaatgcctgcagcctccagaagctggaaaagacaagcaatggattctccaccagatcctccagagggagtgcagcgctgccaacactttgaactcagcccagttataattattttggacttctccagaactataaaagaataaatatttgaaacc

SEQ ID NO: 102 - DNA, 75 bp, Homo sapiens
aaagaacgttttctggagaaagatacgaggtgccacatcagagatacttattaagaccaataaaccaaaatacgg

SEQ ID NO: 103 - DNA, 489 bp, Homo sapiens
atatttcctgaacacctactatgtgctgcaagtactgagatccacagtgcaatccggcagccagggagcacccccgatcacagacactgtggccccgcaatggatgggcgcttccattgctggagctcacttttcctgctctaactgcaggagctgggaatttgaactgtttctctcacttctgggtcccagcatttagaacagggctccactcacagcagccactattgctgaagaagcaaatcccgcgggattgcttgagtcctggcacgtgtgaaatgcctgccaagaactgcagaggacagagacacagtgctccaaaagggttgaatggcaactttatcatggacattttggtgattacaatatctacatttcctggggggtctcagaatcacagaaattatttcaagttagtccgaggctgctcaacgctgaggtcaaaacatctgagagaaaaggttaagtaaaaaatctggttgtttctat

SEQ ID NO: 104 - DNA, 390 bp, Homo sapiens
  misc_feature (1)...(390): n = A,T,C or G
gaaagccagctgccatgtggtgagtgtcaaggcctctgagcccaagctaagccgtcanatcccctgngacctgcacgtacacatncagatggccggaagcanctgaagatccacaaaagaagcgaaantagccttaactgatgacattccaccntggtnantcgntcctgccccactctaactgagntgatatattctcccctncaccccacttaagaaggtactttgcaatattcttcccactcttgagaatgnaaatttgtacacctatccccaaacctataaggaactaatgataatcccccccaccctttggctggactctctttttcaanactcaggcccacccttgcnnccccnaggtggaaataaacagcccttgttgcttca

SEQ ID NO: 105 - DNA, 361 bp, Homo sapiens
  misc_feature (1)...(361): n = A,T,C or G
ttgacgggcagtaaatattcaagacaatgatganggcatcatccantgtgatattncngntgnnngncntaactgaananattgcaccacaannnaagtgnatatggnctgttcctgccttaactgatgacatgggcttgtgaaattncttctccaggctnatnctggntcaaaagctcccctactgagcaccctgtgacccccactctgcccgccananaacaacccccctttgactgtaattttcctttacctacccgaatcctataaaacggccccacccctatctccctttgctgactctcttttcggactcagcccacctgcattcaggtgaaataaacagctttattgctcacac

SEQ ID NO: 106 - DNA, 433 bp, Homo sapiens
  misc_feature (1)...(433): n = A,T,C or G
gggcattcagataagccatcatatcccctgtgacctgcacgtacacatccagatggccggttcctgccttaactgatgacatttcaccacaaaagaagtgaaaatggcctgttcctgccttaactgatgacatggtcttgtgaaattccttctccaggctcatcctggctcaaaagctcccctactgagcaccctgtgacccccactctgcccgccagagaacaacccccctttgactgtaattttcctttacctacccgaatcctataaaacggccccacccctatctccctttgctgactctcttttcggactcagcccacctgcatccaggtgaaataaacagctttattgctcacacaaaaaaaaaaaggncngggnggccaattcagntnggacttaaccaggntgaacttgnnnaaaagggggggac

SEQ ID NO: 107 - DNA, 387 bp, Homo sapiens
  misc_feature (1)...(387): n = A,T,C or G
gttaagcactgggaggcacagatgtatgaggacttgccatctaggagtcagagaatcagcacatatcttgtcatgtcatagctgaagagctgccacctagacctgttcctgctgcttcactctggttttcccatggcccatatggaagggaaccagggttgggctaccaccattttttgctcccagattggaggatgggtgaggcctctccatcccagcttccctggataacttagtttaagcttatgacacatattctctgaaaggcaaacccatgaggtgtattcacaaagaggacatcaaatcccacttggagtcttgtgtcattaaaccattacagtcagccctccatatccctaagntctgcatccatggattcaaccaccc

SEQ ID NO: 108 - DNA, 327 bp, Homo sapiens
gtgtatcctcacccttctacgctccatggtgatcttcctgccaagatttttctccaatcaaaagtccatcttccactttctctttggaaaaagaatgcgtaacagtctcactactgcccatcacctattccctttcactgacatctccccaagcccaactatcattttctgcctttaaaaaataactggaatttatataaatcaatccaacgcctatcatagaccttggttcacagtatgcattaaaatatgtattggttgatcattccttctgcagtgtcaagcactgtgccaggcaacagtgattaaaaataatgaatgaaaccc

SEQ ID NO: 109 - DNA, 287 bp, Homo sapiens
  misc_feature (1)...(287): n = A,T,C or G
attttncatatggcttagaagaaacaagctgacatgttgtgagctacccaagaagagagccatgggacaaggagctgngaccagtggccagcaagaaactgaagcccttagtttaacagtctacaaggacctgaacactgccaacaaccacatgagcttggaaacagattcttcctcagtcaaggtttnagatgagaacttcatccanagtagcactaggattgtgctgtacctggtctcctgacagagaatctctgaaataataaatgtgtattgttttaagccag

SEQ ID NO: 110 - DNA, 129 bp, Homo sapiens
actgtatcccagccactatttttccctcaacgtcactaaatgcaagggaataatgaaaccacaggagagaaaaaagcagctgtctgaataaaagaagaaagaggtagatgcacagaaacagacggacat

SEQ ID NO: 111 - DNA, 462 bp, Homo sapiens
  misc_feature (1)...(462): n = A,T,C or G
tttgccaaccatggattacagagcaaacaaaacaaaaccccaaggacaaaataaagaagcagaacaccttgaagaaagagctgattccaactctgaagtgggaaatgtataggatgggcgtggtagaagatcagaaagctatcaaaaacaattgaggacatgttcaaagaactcaggtgacaaaagaggatcccactggccaaaaatgggacaatgaagtcttatccatcctcctctttactgtggtccccagaactgtgtcttgaacatggcaaaaacttgttcagctgtcatgagaagttgagtgatgagaccttgagcgggaatcatcaatgaaagggccaaggagatgagatggagcattgtaatcaacaaaagtgcttaacccaagaaggggtgncccttatttaattacctttganaatgcttgtnttttaacgttacaaggtatggcaagacaat

SEQ ID NO: 112 - DNA, 257 bp, Homo sapiens
acatgccatgtgctgggcataggaagtgctgtttcagccaccccaaggagcaaccatgagtccagcgtgcctgctcgtcacacctcctcctacccctgagcgccacttctgagttgctcatcagcatccccagctcccagatggctgcctttgtcccctgctttcacagcatggatgtgaaaggagcagtagattaagaaagacccaagataacccgtgaaagatattcactgtggattgacaataaaagccattag

SEQ ID NO: 113 - DNA, 91 bp, Homo sapiens
agacaatcttactatgttgcctaagctgatcttgaaatccggaactcaagtaattctccccctcccagagtgctaagattacagttaaaag

SEQ ID NO: 114 - DNA, 205 bp, Homo sapiens
  misc_feature (1)...(205): n = A,T,C or G
aagacaacgcgaaaacagaagcnnggatcagagngatgcagtcacaaattncacaatnccagggcnnncaacagcagctaggagaggcaaaaatangaaccctgattcttccctgcancccctggcaggagtgnggttctactggggtttggacttctaacctccaaaattgnnaaagaataaatttcngttgcattaagtcctc

SEQ ID NO: 115 - DNA, 464 bp, Homo sapiens
  misc_feature (1)...(464): n = A,T,C or G
cccttgtgtttttggagttntaaaactgaagccatgtggtcacgtttaaatggcagagtattaatcaactgaaaatnantatttntgaaatccaagggcaataaaaccctgtggaagcncccaccccctacccattactcaaattcagacacnannagactgcgtctgtcttcatcctcaccatgatgacccttcatttcaagcaatggaatatttacagcatcatagtggagcttggggtacaagtggggcatggtgctgatagccctgtgttcggtgggacactgccctggtggtggcaactggtgcatgcttcagttctcctccttgatcctcagccacgctcaagtcggtgtttgctgcgcaactcagcgtcgctgctgcccctgctaatgagaattacattgtcatgtaataagtaccttccttgagtncatgaaaataaaaaaaaagtcttaaaaagg

SEQ ID NO: 116 - DNA, 288 bp, Homo sapiens
gtgagaagaatacttgcatgcttctgctttggtcctttggcacagcagctcttagaacataactgcctcactcggagaaagctggagagacccacaaggagaaaaaaggaggctcccagccaacaaccagcacagctttgcagcaaaatgagttggccatcttagaagtgggctggctagatcccgttgaaccaccccacctactcttcctgaaacagacacaagccatcccgctgagccctagtcaaattacagattcatatgcaaaataaatgcttattatttttt

SEQ ID NO: 117 - DNA, 419 bp, Homo sapiens
  misc_feature (1)...(419): n = A,T,C or G
ggggatatttttttttcataanacctgcctgtgatgtttctctgccgtgaatcatgtctatatcctcacaaaggataaaaaccaaagccactagagcagagtctttggatttttctgaatatggaaagcanccatgcattacattgaagcatattccaacgtcagggaacagagcactgcttcctgtccatgtcaccgcaaattccgtgctgagtgttactgcgccaaaggacatgttaggatgccacaacggttctcatctggtccgtgatactcacaggctgatgtngtacactagaaagggagggctctttccaagttacagaacttattttgcaatatttcctgggaaagaattctgctacaagctttaatcaatgtaagaaatgctgtaactacattaaagtaaactgtacatg

SEQ ID NO: 118 - DNA, 469 bp, Homo sapiens
  misc_feature (1)...(469): n = A,T,C or G
aagcgccctcgagaagtgtctaaaggagacaagttgatagccaaacaacagttttggattcactgactgattatgaaagaagcagtagactggtatcaagaatcagtcagcatgttcttgagcatcctgagggcagggaccagccttgacgacccaccctggcagaggctccccagcagcagctgctctgacgagatgtgctcccaggagagagcaacactgtgtggggaaagcccagctctgagaggcggagaaaatgggaagatcaccacctaggtgggagggcggagaaagggataaagaggagtacaaaataaagatgaccttcttgcctaccagcaggctgagaacagatgggggagatcaactgttagaaatattttagagtgcagcaaaccaccatggcgcatgtgtcctgtgtacaaacctgcacgttctgcacatgtttcccaaacnttaaataaattaa

SEQ ID NO: 119 - DNA, 349 bp, Homo sapiens
  misc_feature (1)...(349): n = A,T,C or G
atcccatggagcggatggagcacatgagccaagggtaggcgggctcagtaaagaaaagcccaaatctctcttcagctgtaagttggcccttcactgggctgcactgaccagacctgaacctgactatgtcatcatgactgatgccaatgggttcatatgaccattgccattggtcaccgtattagatatggtgacatcactttacacacttctgagtctntccaggcaacttgtatgtagtgtgcagtctgaagcaatgtctaatctctcagaagaagttctcaaaggaatgtttccaaaaggaccatttttttccgatatattggaaaataaaggctcacctaaaaat

SEQ ID NO: 120 - DNA, 476 bp, Homo sapiens
  misc_feature (1)...(476): n = A,T,C or G
gaagcacctgcagggagcaagctctcgaggaatttctaattaaggacttcttgccaaaggcacatcaccacactgacatgcctcatgacctgggtaaatacaagatggaaaaattgagacccagggaggttatttaccatgccagaacttgaacccagtaaagatgggctttcataatgttggccaggctggtctcgaactcctgacctcaagtgatccttctgcctcagcctttcaaagtgctaggagtacaggtataacattggacaaaagaaaaaaaattgagaacaggggaaagaagtttccattgtctctgaggccttccataagagcgaatcaagaactgaccttatttctcagatctggatgtaaacatgtactctttctgcctcctgcatctgtgacctcaccatgcccagcataagcttatgctgaccccaaagtgtggcagtattattncaactcaacaagtttgg

SEQ ID NO: 121 - DNA, 448 bp, Homo sapiens
  misc_feature (1)...(448): n = A,T,C or G
attgaagatgtcctggatagtgttatatatatgagcctgtgttttcagactttatgaacaccttgaaatgagatagaaagtcatttggagggacaactgaatgacacacttctgttcacaggtaaccaggaccacaaggaaccacaacagggaggattacaggattgtgttatcacctggaaaatcttgagataggaaagtacattttccaggttccttcttcctctggcttccagacaggttcagccaatggaaaacactggtggaaaattgaagtacaggaggaaacaagaagccaaagttcattgaaaagttcaggaaagaagaaagaagaattcattgaaagaagaaaagaacagcagtatggcaggngataaaccccaagtttttgggtccnnnnnnnnnnnnnnnnnnnnnnnnnnnnaaaagggnncgggggggccttttt

SEQ ID NO: 122 - DNA, 221 bp, Homo sapiens
ccaaccttccagccagaggaggcctcgtgacccagttctacccaaacagacccaaacagaagcacctgacaagaaagtggttatgtttctagagctgcatcagctatttataaccatgatggcaagtcccagagaactggtcttgccatcactgagcagttgaaccaataccagcatcaccaactttcctgtatatgagaaaaataaactctatttctttt

SEQ ID NO: 123 - DNA, 389 bp, Homo sapiens
gaacccccggagcttctcgcatcgggtgggaccggcatccggtgagaccgcggtggctctctggggctgaaaattccaagcagagtagcccgaggaatccagccatccccgagggttcagaaatgcaaatcagggctgtgtattcacagcctggactggagatcgaccaaaaactatgcagggctcacccttgcggggcggcggctaaatttaggaaaccaaccatctggagaatgcaggcatcagaagcccctgcagctaggaggatcaatttcaagttcatttttattcactgttcatagatctcccagtttttcctagcgtgttcaagctggaaaggatttcagagattgtgtcacctagatttattttacagaaggaggaactgt

SEQ ID NO: 124 - DNA, 261 bp, Homo sapiens
aagacaaggccgtggctatgttgcccaagctggtctccaactcctgggcttaaacgatcctcctgccttggcctcccaatgtgctgggattacaggcatgagccactgtgcccagccctgaaacaatattcttgatacataaagaacttctgtaagtcagtaagaaaaacactaacaatgtaaatattaaaggacataaaatagctaatgtacaaaaagtagaaatgttacagttaataaacaggagaaatgcttaacctc

SEQ ID NO: 125 - DNA, 454 bp, Homo sapiens
  misc_feature (1)...(454): n = A,T,C or G
gtggggtctttcagtggagaagtgtggagaaggaaaggaggacctggactgcaggtggaggaggaccaaggaggctcttgtaatatcaagatcaagcgtgataagatggggttttgctatgttgcccggtctggtctcgaactcctggggtcaagtgatctgtccacctcggcctcccaaattgctgggattacagacatgagccaccgtgtgcagcctgcctctgtccttctgaaaaaaagatggtacagtcaagatgacctagctgtaacctggctactagaggaccaaggagaaaaataaacttctaccacgctttcgaaaacaagcactcaaactcaggagatacttgattgaagttgaaaaaaggggngcattccccaaggcagtaccctcatgaatgggattagtgtcctttaataaaagagacccaagagaggtcccttgctccttc

SEQ ID NO: 126 - DNA, 238 bp, Homo sapiens
accctgaatgccaacaaccagtttgaagacccccacagaggaacggatcagcatgagaatgcaggtggttcacctccctgtcccatgttcaccctgcatttttcgaccaatcaacaaccgccaagcctgcccctttccaaaacccttaaaaactctaacccaaactcctcagagagatggatttgaggtttcctcccctctcattcggtggccctttgattaaacctttctctgctgc

SEQ ID NO: 127 - DNA, 208 bp, Homo sapiens
gacatccttcccattgacactggaggggccaactacatgttttaatcagagcccacagctgcccacacccactgcagagtgagctactctccaccaaccctgcagccctgaagtttctgtgaccactgaagaggcctgttttcagacttagggtcaaagtgtgggtgacctccaacacctactgtagtgaaggaataaatgtcaatag

SEQ ID NO: 128 - DNA, 384 bp, Homo sapiens
  misc_feature (1)...(384): n = A,T,C or G
gcttcactgagaagatgaaccngccgatgaggtgtgcagagaactttggctgcacaagttaagaggaagaggctgagtctcagctcagagagtgctggtaatgccaagcacagcagagctgccagagggatctacttggaatctggggaggccctggggagactaactggtacaatttaaagagatgcaaagcaaatgatatgcggggcaatcatgtgaaaagcctgctgccttacaggatggactccagctgctcagtgggacgggctgttgggggctgggttttggtagggcaagagggccccggatggagtgatggacactctaactcactactccgccgtccaatacagtccagattgnttaacaactcttaaaaataaa

SEQ ID NO: 129 - DNA, 356 bp, Homo sapiens
  misc_feature (1)...(356): n = A,T,C or G
acggaatcttgctctgctgcccaagctggagtgcaatggcacgatctcagctcactgcaacctccgcctcctgggttcaagcaattctcctgccacagcctcccaaccagctgggattacaggcacccacgaccacgcccggctaatttttgtatttttagtagagatggggtttcaccatgtnggccaggctggtttcaaactcctgacctcgtgatccgcccaccttggcctcccaaagtgctgagactacaggcatgagccaccgcgcccagccaagcagacacttttctaatacattttctgttcattgtacaaattaattcttaatgaatgaagaaattattttaatctac

SEQ ID NO: 130 - DNA, 252 bp, Homo sapiens
gccctgcactcgatggatcagctggcaccacccagatcaataaactggctcatctggtcttgtggcctccatccaagtaccaactcagtgcaagaagacagcttcgaccccgtatgatttaatctccaacctgaccaatcagcactccctactccctggccccctacccaccaaataatcctcaaaaaaacccagtctccaaattttcaggaagactgatttgagtaataataaaactctggtctcccgtcc

SEQ ID NO: 131 - DNA, 456 bp, Homo sapiens
  misc_feature (1)...(456): n = A,T,C or G
tgtgaggatacaactgggaactaaagctggaagatgccagacattcagcagggagttccctcatcagcagctggctaactggggaactgaaagtcacaaggcgctcgtttctgataactccatgaaaattcactctgggtcagaaatcaatctttggagttctgaacatgcagcttttctcatgggccttttggagaacaatcagctactcagccatcagagccttttttgctggatggcaggcaggaactgacagcaaaccatcgtctctacaacacgcagaagatcagcaccaagtctccattctccgaaaacatgtgtccatgcagctctcccangggaggtctgcgctgcagtggaangccccaagaagcgtgggaacccancttcatcgcatgaaggaaacncagagttgtacctccagatgccaggcggagcggcgacgtgacgcacggt

SEQ ID NO: 132 - DNA, 462 bp, Homo sapiens
  misc_feature (1)...(462): n = A,T,C or G
atggctcacctgaaatttctgacaacctgcttcagctgggattaatttctttgaagtgaaatcagtttaactgaggaatcaatttgcttccttccatatatgccaaggaaaaactgtacatagacattgacccacaatacctggttgaccacgggatccgcaagagatgtccaaattatgaacttccattaaaaaaaaacggtggttctatggctgcctggaatggccatatttaattgctccccaggataatagcatttattgttaaacttgctagaaacataacaaaaacgtaaatgctaatctttaaaataagcaggactcctatcacatccttctcttgnggcttttttccctatacccctgctttgggaaccggcttgtttggantngaaaaaggctctggaacangggattctcacctcancactgttnacatgtgggacccaaaattttgggaaa

SEQ ID NO: 133 - DNA, 356 bp, Homo sapiens
  misc_feature (1)...(356): n = A,T,C or G
gggcattcagnataagccatcatataccctgngaccngcncgcncacntctcagatggccggttcctgccttaaccgatgacattncaccacaaaagaagtgaaantggcctgttcctgccttaactgatgacatggtcttgtgaaattccttctcctggctcatcctggctcaaaagctcccctactgagcaccctgtgacccccactctgcccgccagagaacaacccccctttgactgtaattttcctttacctacccgaatcctataaaacggccccacccctatctccctttgctgactctcttttcggactcagcccacctgcatccaggtgaaataaacagctttattg

SEQ ID NO: 134 - DNA, 245 bp, Homo sapiens
aaggagctgagtctccccagaagaggaagtttcaactgagcgattctctgacagaacatcgtggattgagaggaaataagaatgggtgtgcctgctttaggattacacagtgctggacctttgaggaaggagaagcagagatggatagaattgttgtggcagaactgagcttgtatacttggtcctgtggagggtatctactcttcttccagctgcgtagggtaaataaaggtttttgtaaagct

SEQ ID NO: 135 - DNA, 385 bp, Homo sapiens
attgttcaaagaaacactgggaactttcccctccctgaggaacttccatagatgtacacctttggtctccatcccaaacttgctgacctgtgattgttcatccactgccagccatctctgtcctccacctgcacctgggacctgttgccctgcacccatggacaatctcggcttccatccagctccactttgcgctctctccactcttgaatcgcatgaacccaaccaactggttcatgtgtttatttttcatttccttcttttgttctatgtaagtgtttgtttattttttaacctttttacttgccttgaatcctttttggaaatagatgaggtctaaattaaaattgtaataaataacaccgaacatagcctttttaaaagt

SEQ ID NO: 136 - DNA, 400 bp, Homo sapiens
  misc_feature (1)...(400): n = A,T,C or G
gacgtctggggagctcctgcattaagtcatgaactgaggctggcactgcacagagatggaacctgatgaaacggccccatttgagcgcctgctgtatcgcgttggctctgcttcctgcagctgtgctccaagatgagcctttcagacatcgctccctaatagctccatctcccccagtccaggaggatgcgcattcctctcctcattcacatgcaccacttcaagccatctgcacgctctacaggggacttgccgcctaacatcctaatgtgcaaccccatccaaatcctctgctggaatctcactatttgcaccacttacgctccnggagcgtgaaacagaagggccagtcctcttgtctctttattctaagtgnttaatacagattccatgggcttgg

SEQ ID NO: 137 - DNA, 216 bp, Homo sapiens
  misc_feature (1)...(216): n = A,T,C or G
gtggggtctttcaatctggatggactccgatntaaccggtgtccttacaagaagagaagacaggacacgcacacaaagcgagggtcagccatgtgaggacagtgagaaggcggccgtcnacacgccaaggagagaggcctgggaagaaaccaaccttacaccttgacatcagacttctggtctccaaaactgtaggaaaataaatttctcttgttt

SEQ ID NO: 138 - DNA, 450 bp, Homo sapiens
  misc_feature (1)...(450): n = A,T,C or G
atatgacattggatatgtgtttggacacttctgcccgagcatccatactccaccactcaatagctgctcattcaggctagtaatctcatatgtgttgggacaactgagcttccagaatgaagagggcaaactgctgccagacagagtgtcactgtattgcccaggctggaatggagtggtgtaatcttggctcactgcaacctccgccttctgggggttcaagcgattctcatgcctcagcctcccgagcaggcgcacaacaccacgcccggctaatttttgtatttttagtagagatggggttttgctatgttggccaggctggtctgacactcctagcctcaagtctggtctgcctgtcctgggctnttaaaagncctaggattacaggcntganccccgacccagncctgattttatctcttgatcatctggattaaactgtaccaa

SEQ ID NO: 139 - DNA, 330 bp, Homo sapiens
gaaacctgccggaattctccttcttcccccgtcttcacacagctgtgaccccgaacccgtggagtatcgctccttgaggggctcctgcagcacctggtacttggccttggtgatatggaccacttgattcaacactcttcctctggttgaatgggacatccctgaaggcaggaccaatggcccgctcattctccagagcctggctcatcatgagcccttgaggtactaattgaaggagtaaattcacattctccttggacatttcctttcactctttctgtgcatgctaatttactttctctagtaataataaatgtcattttgttttac

SEQ ID NO: 140 - DNA, 236 bp, Homo sapiens
  misc_feature (1)...(236): n = A,T,C or G
agaacctggagatctgcccacccctccaccatatgaggacatggccagaagacagtcacctaggaacgaggaagcaggtcctcaccagacaatgaatctgctggcgccttgatcttggatgtccagcctccagaactgtgagaaataaatgtcttttgtttgtaagcaaaaaaaaaaggccngcgaggccaattnagcttggacttaaccaggctgaacttgntcaaaaggggggg

SEQ ID NO: 141 - DNA, 250 bp, Homo sapiens
ctaccacagcaccctctgcaacttcaaaggagaaagggactcagcacaaatgcccagcaggagagagtggacaaaatggctcttgtcaccaatggaatgctctacagcaattcaaaagaaagaaacacctctacatatcgatggaaataaacaaaaactaggtgcaatgtggtgtcctggatgaatcctggaacagaaggagaacatacgaggagaaactgttaaagtccaaataaattctggaactttg

SEQ ID NO: 142 - DNA, 313 bp, Homo sapiens
gattttgaagcataaggtccatctgttgggggaaggcaagaagaatcagttcttctctcgagcacggcccattcatctagactcacgcaatgactgtgattccaaaagactgaccaaacattaccaagtgggcaggctactggggacaattccggaaacatttctaggaagactggaagaaatacagtaatctagcacatatgcaaaagaatatcaaaagatgaactgttttcatcagccaacccttatgaatgctaacatgtccagtcctcttacagttcgtcgctaggttaatagaggcattcaaaaattt

SEQ ID NO: 143 - DNA, 443 bp, Homo sapiens
  misc_feature (1)...(443): n = A,T,C or G
gaggaggctccacctgctgccggcccaccaatacttccggctgactgctttgccgaacaggaaagggtctactttctattctcctatattaacaagatcccatgttttaggtgagcactttggtcacccacttaaatgacgacatttctcagactcacttgtagtagaatttatagccatttgatttagttttggcctgtgagctgtaagggaaagtgttcaatgatgcatcaggagagcctccttaaaaacaaaaggagaaagtgagttgagttattttccctttttttttcaccctcttgcctggatcatggtggatgtgaaagctaagttctgataactggcttggaccatgagaataagggccccgttgtangggggggggaaaaattgngctggaanaaagaactngcntctggtatgacttcatggagcttctgcca

SEQ ID NO: 144 - DNA, 342 bp, Homo sapiens
  misc_feature (1)...(342): n = A,T,C or G
acggaatcttgctctgctgcccaagctggagtgcaatggcacgatctcagctcactgcaacctccgcctcctgggttcaagcaattctcctgccacagcctcccaaccagctgggattacaggcacccacgaccacgcccggctaatttttgtatttttagtagagatggggtttcaccatgtnggccaggctggtttcaaactccngacctcgtgatccgcccaccttggcctcccaaagtgctgagactacaggcatgagccaccgcgcccagccaaagcagacactttttctaatacattttctgttcatttgtacaaanttaatntctttaattgaat

SEQ ID NO: 145 - DNA, 393 bp, Homo sapiens
  misc_feature (1)...(393): n = A,T,C or G
atggagtttctctctcgttgcccagactggagtgcaatggcacgatctcagctcactgcaacctctgcctcctgggttcaagtgattctccagcctcagcctcccgagtagctggaattacaggcgtcccccaccacaccagctaatttttgtatttttcgtagagacgggatttcgccatgttgtccagactggtcccaaacttctggcctcaggtggnccgcccccctcagcctcccaaactgctgggattgcaggtgtgaaccacagtgcccggcccattctttctttttcttagcatccctatattagtctgttttcacgctgctaataaagacgtacccaagactgggaaaanttattgntnacaaaaaaaaaaagggcggggggggc

SEQ ID NO: 146 - DNA, 281 bp, Homo sapiens
  misc_feature (1)...(281): n = A,T,C or G
cgtacggatgactnccgnangctnngcacacnctcgaaatgcgnaangaccnccggctgngntcgtggacctgnncngctnccttttgagcaagttcaagcctggttaaagtccaagctngaattggcctccgctaggcctatatngaaattctatatagggccgctatgngccaatttcttttgctttttaccctgggggaaaggaaatacctcattagaagcccacccttctggtgtattttacccccnaattctttcaacaaaggaaaaaaaactggt

SEQ ID NO: 147 - DNA, 472 bp, Homo sapiens
  misc_feature (1)...(472): n = A,T,C or G
gtctaaccataaaatcatcaatactgagaaattaaaaggggaacatgtcaggcctcactctttctgtattggctttcaagagtattgtccttgagggaaagccatctccttcttgacaccatggctacccttagacccctcgtgaagcccaagatcatctaagatggaccaagaagtttatccttcaccagtcagactgacatatcaaaattagatgtacgcatatagcagcaacccagaggcattgacaacagggtggggagaaaaatcaaaggcgagaccttgatccccaacattggttgtgggagcaaaaagaagcaaaacacatgctccccagtggctttcaaaaaattctgnttccccnatgtcaaaaanctggaagtgctgctgatgtgcaacaaatcttactggctgagattgctcaacatgcttctccaagaacgggtaaagccctgtggagagagtaacccgg

SEQ ID NO: 148 - DNA, 465 bp, Homo sapiens
agtcgtccttgtctactccactaccaaatgttgaagttcttcaagaatcagtcctttggaggtgatgtcattgaaaatgatgagtaggaaactccaagagcgcatttctccacaaaaccagtgaatacattggcacaaattgtcagaatcaattttatataaattctggaaattagtcaaaggtttatagtaaccaaggaaacatctttttaaaaagatggctgaggctggatgctgtggcttatacctgtaatcccagcactttgagaggccaaggcgagcagagcatttgagtcaggagttagagaccagcaaaaaaaattagctgggtgtgtttgcgggcacctgtaatccctcagggaggctgaggcgggagaatcgcttgaacctggaagatggaggttgcagtgagccaagatcgtgccacctcactccagcctgggtgatagagtgagactctgtctc

SEQ ID NO: 149 - DNA, 434 bp, Homo sapiens
  misc_feature (1)...(434): n = A,T,C or G
gggcattcagataagccatcatatcccctgtgacctgcacgtacacatccagatggccggtccctgccttaactgatgacatttcaccacaaaagaagtgaaaatggcctgttcctgccttaactgatgacatggtcttgtgaaattccttctcctggctcatcctggctcaaaagctcccctactgagcaccctgtgacccccactctgcccgccagagaacaacccccctttgactgtaattttcctttacctacccgaatcctataaaacgnccccacccctatctccctttgctgactctcttttcggactcagcccacctgcatccaggtgaaataaacagctttattgctcacacaaaaaaaaaaaggnnnggggggncnatttanttngganttaancnggnngaaattnttcaaaagggggggact

SEQ ID NO: 150 - DNA, 435 bp, Homo sapiens
  misc_feature (1)...(435): n = A,T,C or G
gggcattcagataagccatcatatcccctgtgacctgcacgtacacatccagatggccggttcctgccttaactgatgacatttcaccacaaaagaagtgaaaatggcctgttcctgccttaactgatgacatggtcttgtgaaattccttctcctggctcatcctggctcaaaagctcccctactgagcaccctgtgacccccactctgcccgccagagaacaacccccctttgactgtaattttcctttacctacccgaatcctataaaacggccccacccctatctccctttgctgactctcttttcggactcagcccacctgcatccaggtgaaataaacagctttattgctcacaaaaaaaaaaaggnncnngnggncnattnagntnggncttaaccnggnngaacttnttcaaaagggggggactccc

SEQ ID NO: 151 - DNA, 81 bp, Homo sapiens
aatcaagatttcactggatttcccttgaggtgcacatttcctggatgatttccacttgtgaaatagaagaagattcgttgc

SEQ ID NO: 152 - DNA, 198 bp, Homo sapiens
aactcccaggttctccaactacaacagatctccaaaacaaaacaagcaaaactcagaatctgatggaaagctgtttttaaaagacaaagatggtggggaaaatacaattaatatctactgacatctactacaccagccactgtgaggggaagtctacatgttatcttataaaaataaaaacaccccataaccaccatc

SEQ ID NO: 153 - DNA, 367 bp, Homo sapiens
  misc_feature (1)...(367): n = A,T,C or G
cccaaaccataaggnccatctcaccttcactgcaacaaagaagggttgttaaagctggacacagatttgctcggcttcaccctctgatgtgttccacaccacttcacgccacttttcaaaaagatgataaaacgtcaggctgagtagaacagaactgggtgcaaataaatctctctgaagctaacttgcctctctctacccctacttccctctgcacgtgcctttgctttattcccctgcatgagagaagcagtcaaatctttcccattttcatacctggattgctgctcaacagcctcaacaactgagacctgaatgtatccccattttaaagaacctaacagaacattaaaattgtttcctgagc

SEQ ID NO: 154 - DNA, 408 bp, Homo sapiens
cttttaagtttcgggtgaccatttttgccccaaggcttaacaaaaccctggaaaattgttacaaaagctgccaagctcaaagaggctgaaagcccccattgagtgccgaagagtcaataatatctgactcaaagtcacgatgattcttccgatacacaaacaaggccacaactacagagatcgccaggcaaacgatcactgctatcacaatcccaacatagagagcaacatcatctgaatcaggagcggctagagaggagagtgaaacattgaaccagctgcttatagaaatttcccacagtacacatatgtattgctataattttttcagacatttactgccttttttataggttaatttcaaatctatttcaaaagctatataaaatggctgtggcctttcagtgg

SEQ ID NO: 155 - DNA, 364 bp, Homo sapiens
attccctagagacaaagccagtttgcctgacctctcaaccaaagaaccctgacaacttactccttagctagtatctccgtatatataaagatgtcaacttcatcatcagttcccagaaaccctctccaactgagtactgtattgtatgtaatatgaacaaaaactatgaaaggaaagaaaattgaggcccagagaatgcaaaaaatgattaaattcagaggcaaataactgagaagtagcaaggccaagaacaggcatctaggttacacatctctatcttcgagtgcatttttctaaaacaaagggcttggacccacaaaccatcacctggaattgcatgtgtgactgaaagggaggaaactgc

SEQ ID NO: 156 - DNA, 291 bp, Homo sapiens
actccaaataagaaaatgaaagagtacaattcaggagatgaaagaaaaggaaaatccaggaaattcaatcagatctacatgactcatgttgtgtcaactgcaaatttctgatttcaaacttaaaaaaaaagaaacttcaaggacccttcaaattatgttcaagtcatatgcctgatgagacaattgaatcacattactggactacattttttccccttgattcaatctcttgctgccacaaatatgtttgttcagtgtaaatggagtgataaagattgacctttctagttg

SEQ ID NO: 157 - DNA, 454 bp, Homo sapiens
  misc_feature (1)...(454): n = A,T,C or G
ttggggagctcctgcattaagtnananctgangaaaaagagaacagcgaggagaaaaggataatagaggaaaagagcagaaagaagccatttatatctgactgctgctgtgggagttacagaatctccctcttcaacttgggccctttgcagatggtgtctctacaaagcaaagtgaaatggacggttttccagctaatttgttttgtatggacagccaagctggacacttgcagaccacaaagtctgtgaatgagaacctgggagctgacatgagaagaattgagctggagccttttgccatcactgaataaataacttaccctcttgaatccttacctgtacgactggcataagacaccagcctgcctttcacacagcttgtgatctaataagataatgcttatgtacctgttttaatataaatagactgatattaaaatggcacgtaacac

SEQ ID NO: 158 - DNA, 373 bp, Homo sapiens
tacaaccaactctgaagccaagggaccacctttgcacatgagagacagtcatcaggaagcccaactgatcaatatgaaatcagtcatccacggccgggcgcagtggctcatgcctgtaatcccagcactttgggaggctgaggcgggtggatcacctgaggtcaagagttccagaccagcctggccaacatggtgaaaccccgtctctactaaaaatataaaaactaactgggcacagtggcgcacactaataccagctacttgggaggctgaggcaggagaattgcttgaatatgggaggcagaggttacacagagccaagattgcgccattgtgcgatccagcctgggcaacaagagcgaaactccctttc

SEQ ID NO: 159 - DNA, 391 bp, Homo sapiens
  misc_feature (1)...(391): n = A,T,C or G
tctggggagctcctgnnttnagntacanntntagggcatnactganagccatctatcccctgngacctgcacgtacacatccagatggccggntcctgccttaactgatgacatttcaccacaaaagaagtgaaaatggcctgttcctgccttaactgatgacatggtcttgtgaaattccttctcctggctcatcctggctcaaaagctcccctactgagcaccctgtgactcccactctgcccgccagagaacaacccccctttgactgtaattttcctttacctacccgaatcctataaaacggccccacccctatctccctttgctgactctcttttcggactcagcccacctgcatccaggtgaaataaacagctttattgctcac

SEQ ID NO: 160 - DNA, 285 bp, Homo sapiens
gtgcttatcacacatgcagtcaatgaacacctcacaaatgcaaggttcacatgcagtcttcgatgaacacatcgatcgcatccagcagtatgtctgtattggaaaagtccttccatagcacccagtaatgaaaaggaatgtggcggggagcagtactggacagtaaaactaaaaacaccaggaagatcacagtgagatcagcagagccctagaatggcaaatccatgacaaagaaaatttctgatgaataaaaacgtgcctgggtccaggccagcaattggcttc

SEQ ID NO: 161 - DNA, 180 bp, Homo sapiens
atgccgtttggagtagctactttgaggacaagagacaaaaagcctgaggagaaagtcaccatgaaggaaacagaaagactaaacagcatgcgtgatctttgattcagagtccccatctcaccctggactgccttcctttggaattcccttgtggaaaaaaaaattaaactcttatttggt

SEQ ID NO: 162 - DNA, 235 bp, Homo sapiens
  misc_feature (1)...(235): n = A,T,C or G
gccctgcactngatggatcaagctggcaccacccagatnnataaactggctcatctgntcttgtggcctccatccaagtacngactgagngctagaagacagcttcgaccncntgtgatttaatctcnnacctgaccaatctgcnctctctattgcttggcccnctacccaccaaattattttcaaanaaacccactntcnaggttttcaagaanactgatttgagtaataataa

SEQ ID NO: 163 - DNA, 588 bp, Homo sapiens
ggtccaaactttagggtccccaccttgttacttgcaatgaaacggacacagtggaagacagcttggagtaggaaaaggactgaagactgcagcagccaggtgaacttctattcgtccatcaagacccaacccaaagaaacccacttgaagccaggcgggagggctcacgcctgtaatcccagcactttgggaggccgaggctggcggatcacctgaggtcgggagttcaagaccagcctggccactatggtgaaactccgtttctactaaaaataaaaaaaatagccgggcatcatggtgggtgcctgtagtcccagctactcgagaggctgaggcaggataatcgtttgaacccgggaggcggaagttgcagtgagctgagattgcaccattgcactccagcctgggcgacaaagcgagactccgtctcaaacaacaacaacaacaaactacactctagtctgggcgacagagcaagaccctgtcttaaaaacaaacaaacaaacaaggaaaccccatttgtaactgccactaattggactatacttctggtgggccatcttcaagcttcgggcttgaataaaccct

SEQ ID NO: 164 - DNA, 342 bp, Homo sapiens
agaggaacaaaatggacacagtagttctgtgcttctccttgcaaagtgagcaacaggaccaagatccgaagcaatatcagaggccactgcacccagcagcagagatgagaacaactgaagttccaaatagatctatggcaagctcaaagctaaggtcataaaatgttctatgaaagcaagaccatgggaagaactggcacatgtgtttgggaagaggaaaaggttattgagtgcctactatgtgtcaggcactgagctgaatgcttccacatattaatgttttatacttgagttttcattaacagctctaatctgtactattaataaaagataaagaaatcc

SEQ ID NO: 165 - DNA, 350 bp, Homo sapiens
aaaatagttggagaaatctaaggttgaaaacaacatatgttctctatattaaaacgtcaagagctgtactgaggaagtttgtggagtgggtggtagtgatagagacatactcaggaaggctggacccatggaggctgcccaccttgttcattgatttctacttgattgattccttcttgattgatttccaggatctctgaaacgagaagccctcccctttatatgtttaatcagatattgcaaagtggacctgagaacgagcctgtcggaagcagattatgaaggggcctatgttttgaatatgctgaactgctttggtttgtgactggggaagattaaaggcctacaac

SEQ ID NO: 166 - DNA, 348 bp, Homo sapiens
agtgtgggattttcagcaagaagcagctgctcagtcaggggctacatgccccagcaccccttgtatctaggtggtgccatataactactcccaccaatggaatggaaagtgatttgagcacctctaggctgagggaggtggaaagtgatgtgccttctccgtgctctcttcctccatctgccaaacagacacaggggactccaagaccctagggaatggaagagcaacccatggaaggggcctgggctgctgaatcactcagggcagggctccaccggtggagtgaccaccagtctgaaacacctatgttggactgagtgagaaataaactctactgtgttaagccat

SEQ ID NO: 167 - DNA, 574 bp, Homo sapiens
  misc_feature (1)...(574): n = A,T,C or G
gtggntntgtccttttggaccaattatctaacctgggcctggactccatctaccactgtcctgcctggttcactgcagctcacttcatcttcctgtgccttctctgaaagggcccctccaaaagtttcctggaaactctcaaacaactgagaaggtgcctcgacatctgatttgccccaaacctctatacattggacatcttctgaataaggctgtgttgtatgttgggacaagcaaagggatggaaatcaagaattctgggttttagtcctgactgtcactacatggctgtgttacttctgactctgtgaagcagaactcgggcctctagcgtctgctagtctagatctaaaggtgtttcctgagggacagtttggcctggcatgcaggtacctctgcagaccacaacagtgcaccgaaaacaccccctcccagcacgcacacaagtctggctcctcagccaaacatcaaacaccaacactgctgcccatgccagatgccaaagtgagataatgtgtgttatacccttaagtgngntacaaagagaaaagattaataaatgttagctatcctt

SEQ ID NO: 168 - DNA, 240 bp, Homo sapiens
  misc_feature (1)...(240): n = A,T,C or G
catgtgagtactcagaagacagctgtctgcaactcagaaagaagtctcaccaaaaactgaagcctaccaggaccttgatcttggacttccctgccagctagaactgtgagaaaataaataagtacatatttgttgtttgcaccacccagcctataggattttgttatggcagccctagcagactaatacatgcngtgttttgatataaatttattaaagaaacttctttatttgcttacc

SEQ ID NO: 169 - DNA, 454 bp, Homo sapiens
acctcaacatgttttatctgggagtcttcctctttcatgacattcacaggaggcctatggtgtgccaggccccgtggacagcactgtggacacagatgcgtaataacagttcctaccttccagatagagaggcaagaaagggctgtggaagcaaacccaaggtactaaggaagccgggaagagaacctactctagacttggaagttgaaggggtcaagaaacattcctagagaagatacctgagtcttgaaaactgagaaggaattagtaacccaacagaggtgggaactttctgaggacggagatggagaggaagatgctgccagctgagggaccaccattctgaaagctaggagaaagtgcgcgatggaaagtgggcctgagggaaaggctgtaagcacctcactattaatcacaattctccctataggaaaataaatgctgtttctacttc

SEQ ID NO: 170 - DNA, 262 bp, Homo sapiens
  misc_feature (1)...(262): n = A,T,C or G
cccactggcttccttacacctcctcgaacacgccagatgttacctgacggctcttgccagaatattctctgcctggaacgcgcatcccccagatatccacgtggctaactccctgacctcttttgagtctctgctcaaatgttatctcttcactcacacacaccnttggcactctactcaaatttacaaccagccacctacccccagccaaaactctgctagaaaaaaacggtatttaccataaagtcattgccaagcttgt

SEQ ID NO: 171 - DNA, 297 bp, Homo sapiens
atggtgtttcgctcttattgcccaggctggagtgcaatgacgtgatcttgactcaccacagcctctgcatccaggattcaagctattcccctgcctcagcctcccaaaatgctgggattataggcgtgagccgccacgcctggccagcattcccaatttttaaaaatgaatgattggcacaaatcttagaaagccattttctgtagatttgaaagcaatgctatttacattgttactactttcttgttaaatcttgcatgtctgcagtatgtgttgtaatagaaacctaagattatg

SEQ ID NO: 172 - DNA, 113 bp, Homo sapiens
ctggactccgtcccatagatgagctgaagcaaaaggaccttcacacagaacttttatcatcagcctgaggaaaagtactcgaaggacaaggccattggttgggaacttacacc

SEQ ID NO: 173 - DNA, 466 bp, Homo sapiens
  misc_feature (1)...(466): n = A,T,C or G
cagggcctaagctgactttgcaagagatctcgctaagcctttctgcagatgcttgcccaatctggctggccctgctggaggatatatgctgttaaggcaaggcaggcagaggcagctctggctcgtctccacgtgcactggctggctttccagaggggacaatgcaccccacagaccacagctgtcatttggccatctctaccttcaaccttaccaagcacctggcctcagcacagattttcagagaaaactttgaacaaagcaacccaacactgtatttgtagaattggaagagacttggagccttccgaatgtgacctgactgctcaaatggagaaatgagaagtgggtaagcttgagcgcaagcttacactgnnaggtgggtggttgaaacgaaaacctctggattcctattaccaggncaagtnntactnttcagtttatcatacanggctttaaggggagc

SEQ ID NO: 174 - DNA, 354 bp, Homo sapiens
atggagtttctctctcgttgcccagactggagtgcaatggcacgatctcagctcactgcaacctctgcctcctgggttcaagtgattctccagcctcagcctcccgagtagctggaattacaggcgtcccccaccacaccagctaatttttgtatttttcgtagagacgggatttcgccatgttgtccagactggtcccaaacttctggcctcaggtggtccgcccccctcagcctcccaaactgctgggattgcaggtgtgaaccacagtgcccggcccattctttctttttcttagcatccctatattaagtctgttttcacgctgctaataaagacgtacccaagactgag

SEQ ID NO: 175 - DNA, 181 bp, Homo sapiens
atcctcagtgtcatatgatggctgctgtagatcctgccaaagaagatagagtatcttcatcacaagccagttcctgaccttcccactagaggagctgaacaaatgtcatgacaatttaacagaatagagctacagaaagagctaacagaatagagctactcatcatcatcctctagcctcc

SEQ ID NO: 176 - DNA, 240 bp, Homo sapiens
gaaagttgtgtttttgctcgtcgactcaaggcctcgaggactttccccacttttttctatggcacacagagttctgcacgtgaacttcttgctggttaactggattgcatcaaaatgatttctctgtgaggtactattgctaccaggatatcaattactatcctaatgtggacatttgctctgatatgcataacaattgaaaatagaaataagcctctcagggcaatcatttcaattcac

SEQ ID NO: 177 - DNA, 173 bp, Homo sapiens
ccaccctcctcctaactttggacagagcttactccagaagacagtcttggagtagaacaccatggaccaagtacttgccgagcatgcccactgccctcgattgtacatgtgcaaatactttctttgcctattcagaaattagcagaaactgttgaataaagggataaaggagg

SEQ ID NO: 178 - DNA, 317 bp, Homo sapiens
aatactgtggtatttcctcttaaatacaatcttccagggcaaggcatggtattccagataacacaccaacaatggatccattctatggcttcacaaagtcaatcttggagaaagaaccgccaaaagctggcacaagcagtagcacctttacagtgggcaggaaaacaaccagaagtcttggggctgcagagatccaggccggcgagaagtccagagcatcagacaggaagagtttcctgggggtaggaacagtgactggcacatgcgggataaaagttcatgaaagaagccgaatcgattaaaggaaataaaaaggc

SEQ ID NO: 179 - DNA, 170 bp, Homo sapiens
ggacaacgtcttgctatgttgcctggactgaactcgaactacccagctcaagcaatcctcccaagtagctggaactacagggtcgcactgtgttttatctaagttttaagaatatatatttcaccccacaccctcttgccatgagactcaataaaaatatatatacaggc

SEQ ID NO: 180 - DNA, 220 bp, Homo sapiens
gttatcaaagagtcttcagtttggtggaggacggatttgctctaaagctctttagaaggagaaagagaagcattctgcaggaaccctagaaatgaaacgcaaccagcaagctgccatttgtccagagaagctcacactccctgggaaatggaatattgggtctcaacctgaagagtagctggacagagacaggaattcacaaataaaagctttaaaagat

SEQ ID NO: 181 - DNA, 360 bp, Homo sapiens
ggttttcagggccaccaccatccagaccttcggaaaccctgcactggaccaacacccatgtccccaggacacctgaccctaaactcgcccgtagggcctgttgatgcacgctaggagtttcctgatgatgcccagcatttccctacctccttccctcggtctaatctcagccccttctcatctccacagtgctagctgctctgttcccattttgtcccacggtccagcactgggcttttcgctgacccgctaccatgtgccatttatttatctggccagacgctgaggctcagaggttctgcttcctgatacgggacctggcacaccaaaggagcccaataaatgtctagggagcgaatg

SEQ ID NO: 182 - DNA, 362 bp, Homo sapiens
acctccagccttcaaatttcaatcataacttcagctaaaagcagcggcgggacagacgctgaagggaagtgacacggagctaacgcacagcgcttccagagacactttctccgctttctcgcagctcctccgcacggcgtcctgtgggcggccaccacaccgcaatctattctgagtttgcaagtggaaattaaattccttgtagccgaaatgagcccccacttcaatcagcctgaagcctgtcctcccatcccccaccgccctcccgctgcagcatcttttgaatatgcaaatgggacaccttgctaaatggtcagcaggattgatcctgctgttttcatcaaggaaataaaattaaaacg

SEQ ID NO: 183 - DNA, 438 bp, Homo sapiens
  misc_feature (1)...(438): n = A,T,C or G
gtctgagcccagggagctacttctggagatgctgtggtctggggtggatcctgccttctcagcccctgcctgttgaagtcactgaagtctctgctgcatctccgggcttctgctgagcagggctggaaggtcttgcttgaggagctgaagcccaccagcaggtggcagacaaatccagagggtattcattggaggatgaagatttcctgcctctgctcangattctcacggtgtggctgctgcagggaagtcagatcacctacgtggaggcccaggggcctggctctggaaacaggaggcagaagctgccagtctctantcttgggcctggcanctggcataacattacttcccccctattccntcgntnaaagcagcacaagaaccccaccttnnttttcannagngaaaggggctanggaccccgcctttctattg

SEQ ID NO: 184 - DNA, 462 bp, Homo sapiens
  misc_feature (1)...(462): n = A,T,C or G
attggaagaagttgttagcttcttttctcagaacggacatgtggatttggggcaaggaagaaaagcaaaagcaaaagcccaaacattctaacgcaggaatggcgttcgaagatctgcaactatactacttggaaatgatccccaggctaaagtgaccagggaagtgacccaaaaaacaaattcttcttgacttttaaggcaggtgcaactgtggacagctgaggtcccctttgaaattatcttgccatcgtaggatgggctaggatgactcaactctttaaatgcatgttaaagactggctactgtatttactacattctggcctcattttttttggttatgattttgaaactcagaatgaacaataccacgtgtgtgatgatttagtcgcaaaaaaaaaaggccagngaggccaattcagctnggacttaaccaggnngaacttgntcaaaagggggggac

SEQ ID NO: 185 - DNA, 241 bp, Homo sapiens
gtcttttgcagctgccttgggcccttagcgcccacgtcccagacccggacctcttggctcagatcttggatgaacctagcaaccttgaggacagacaggtaatttcaacattttctcctgtggaaggcagaatccctcctccttctctcaaggatatccatatcctaatctctggaacctgttaccttacacgatgaaaagaactttgcagatgtaattaagtttatgacctcatctctac

SEQ ID NO: 186 - DNA, 476 bp, Homo sapiens
  misc_feature (1)...(476): n = A,T,C or G
aaggaccagcgtgcaggaggccctcaataaatattaactgaatggatgattcaagaattattccagtcctaaacatcaaagatttccaggtgatgttcaagagaaactattcaaactaagaattgcctggaagagtggattctagaaggaagaatgggtgactaaganttactcacatatcagaaaaccagaaaattcagaagatcttagcgatggcaccaccacccattcaccagcttaatctagaaacctggacatcatcattgactcaccttgatgatgcaattaaccagcaagtcatgacctctctgctttcaaattttttcttgaaaccatccatatttctccattttcactgccactggcccatgccaaaccctcatgtctcctctagagcttcctacattttcttctagctagatttcctctaaaccactttacacagaaaagctaaaatgaatttctttaaaaaacct

SEQ ID NO: 187 - DNA, 226 bp, Homo sapiens
acccttaccaccaccatgagaacaagctcaggctggcctgccagaacatggaaccaagcagaatcatcccaactgaggccatcctaggccagcccccagccaaccctcagttgacagcacatgcataagcaagccctgtgcacatcagctgaacttgtcacagatcagcaaaactgtccagtcaatttgcagacttccgagaaataataaatggttgttttaagcc

SEQ ID NO: 188 - DNA, 90 bp, Homo sapiens
  misc_feature (1)...(90): n = A,T,C or G
gtttatttgcangangggtttnagggaatnanngatnnagtctgctgaaantatcaccaccctctggattanaagggatgtttggatgaa

SEQ ID NO: 189 - DNA, 261 bp, Homo sapiens
  misc_feature (1)...(261): n = A,T,C or G
gtggggtctttcaccatcagatgagaacacattgagaatgtatcatctatgaaccaggaaatgggccctcaccagccaccaaatctgcagaagctttgatcttggacttcctagtctccagaattgtgagaaataccntttgggngtgtatannctggntaannncaagctgaangggcctcgnnggcctntatgantnctatatggccgntatggccnattcnnnnggngggnaccccgnaagaaatactcataagccac

SEQ ID NO: 190 - DNA, 352 bp, Homo sapiens
gttcaaaatttctattacaaattattgcatcctcctgtgaagactgcagcctctcaggtgtcttccatacgactaaaatgaagaggaagcacaaggagaaatctggacacagagacagatgcacacaaggggaagacaatgtgaagacacgcagggagaacatcacgtgaagacagaggatgggaatgacgcttcaacaagccaaggaacactaaagatgactggcaaccaacagtagctaggagaaggcaaggaaggattcccccatgggttttagagggaacacagcctcgtcaacaccttgatttcacacttctggcctccaaaactgggagataataaatttctggtt

SEQ ID NO: 191 - DNA, 465 bp, Homo sapiens
  misc_feature (1)...(465): n = A,T,C or G
aaacccaaaggccagaaggaaatggcaaaacagttttcatgtgctagaagactatcaacccagaattttatacccagagaatatatccttcatgaataaagaagccacagcattctcagatgaagaaaactatgagaatctgttggcagaccaccctaagagaatgactaagtgaagtcctctaagcagaaaggaaacaataaaagaaggaatcttggaatatcagaaaaggaaaacatggaagtcaaaatacagtggtaaactatgaaatgtcagcgttcagccagatggtatgatggagcagcagaagtcagaattcagtgaggggacactgaaggaacagataatggnnctgnnttngcntggaaggggnnntcaatttgtaatttcagggttaactgcagaagtgtcttcaggaaggctgcatctgcaagccaggaagagagaactcaccagaaaccaaat

SEQ ID NO: 192 - DNA, 134 bp, Homo sapiens
gattctgacaagtccggagtacgtcccctcatcatcagggcaggaggtaacgtgctgaatttaatagcaaagcaaattttgctggagaagaaatgagatttctttgtcaaggaaccagccggaggaacttcagc

SEQ ID NO: 193 - DNA, 421 bp, Homo sapiens
  misc_feature (1)...(421): n = A,T,C or G
agcctgaacttgatggatcangctggcaccacccagatcgattaattggctcatctgatctgggggcccccccgacccaggaactgactcagcgcaaggagacagctccgactctccatgatttcatccctgaccaatcagcactcctggctcactggctcccccacccaccaagttgtcctgaaacactgctcacccagtgcttggggagactgatttgagtaataataaaactctggtcttctggttctagatccttgaggaatcgccacactgtctgccacaatggttgaactaatttacactcccaccaacagtataaataaaaacaaaacaaaacnaaaaaaaaaaagggccgggggggcaanttnagttnggatttaacaagggtngaatttnttaaaaagggggggactaccca

SEQ ID NO: 194 - DNA, 472 bp, Homo sapiens
  misc_feature (1)...(472): n = A,T,C or G
gcctgcaccgagatcgacgccatcagcgtggagaagaggcgcatcatgcagcaatgggccagcagcctggtgggcatgaagcaccgcgacgaggcgcacagggcggtgctggaggcgctcagcgtgtccctagagcgcttcccaagtcaaaatataaacaccgctcgttcccgcctttctaccacatggcattccgctgggatacttctacggggaagcttcctgcccggggcatcgagggcgttcgcgtccgtctgttatggcggtgctgctgtagataaccggatccgcgaatgctaacgctcaccaggatgctatatagccttttttatattgcctattaagccccgaatgntttgggtctancgggtattgctaagtaggattgtgacagtcacgcccccggcagcggtgtttcaaagtcccctgacagctcaacatgttgtcacacttcangactgtgccaatccac

SEQ ID NO: 195 - DNA, 367 bp, Homo sapiens
  misc_feature (1)...(367): n = A,T,C or G
tgaggggcattcagataagccatcatatcccctgtgacctgcacgtacacatncagatggccgggtcctgccttaactgatgacatttgaccacanaanaanngaaaanggcctgttnctgccntaacngatgacatggnanttgagaaannccttctgnctggctcatcctggctcaaaagctnccctactgagcaccntgggnnnnccactctgcccgccanagaacaacccccctttgactgnaatttttcctttacctaccccgaatcctataaaacggccccacccctatcttccctttgcttgactctcttttttggactcaagccccacctgcatccagngtgaaataaacaactttatt

SEQ ID NO: 196 - DNA, 507 bp, Homo sapiens
  misc_feature (1)...(507): n = A,T,C or G
gtcagctgaggagaggaaaggattcttagcttgagttcactccagttgcctaatgtcatgcccattgctcaagcccatgtggcctgtttgaaggagaactgcttatctgtgcagcaatctatccgagggcctttgggccattatgctgtgaatgtgacatctgcagccaagctctgcagtcagagtctatgtaacaatcatggaagagtattcgaaaaacacctgagtcctccttctatctgcatatgcctgaaagcagtggtaagaaatatgttctaaacaagagtttcagattcatcatttctgaaaataataaacagaagacaataacagacatgaagaatggatttgtgtgtcactgctattacggctggcatggaccgtcttgtcacgatcactcttcagatctcctaagagtgatgaataaggctcctactattaacttcaatttattaanttttctcattatggcttcttctgngattctgctaaaaaaaatttagccca

SEQ ID NO: 197 - DNA, 176 bp, Homo sapiens
ggcccatcccttggttttagcctggaagaccagttttgactttgaaccggttggcctagaatttggtgctttgtactacaaactagattcccagctttgtccagccctcctggagttgactgctgcctgaagaatttctcaccatgtaaacacaactctcctaaagcaggcctttg

SEQ ID NO: 198 - DNA, 304 bp, Homo sapiens
agacagggtctcactatgttgcccaggccagtcttaaaatcctgcctcaagcagtcctcctgccttggccttccaaaatgctcggattataggcaagagtgtcaggcatactatatgctaatccaacaggactgtggtcttataagaagaggaagactctctctccaccatgagaagacacaatgagaaggctgccatctgcaagccagaaggagagccctcgctgggaggtcagccatgctggcaccctgatctcagacttccggcctccagagttggaagaaaataaacgtctgttgtttat

SEQ ID NO: 199 - DNA, 422 bp, Homo sapiens
  misc_feature (1)...(422): n = A,T,C or G
gcaccaccttacgaactggacactccgtggtgacctgaacggaaaggtggctgcccctctgcagctcaggtcttggtagagaagatctaccataaacagtgtagctacaaaatgctgagaatcagagggtcccaccaaactgactttaatatccaatgaagggacagctgtgtcctggactctccacaaatgttgacgtcatgaagaacaagaaagactgaaaacctgttccagattgaaggaaattagagatgtgacaactgaatacaccttatgatctgggatgggatcctagacccaaggacattagtgggtcnatggcaaaatctgacagaaattcaaggactgcttctctcattaaataagcttttcaaggaaaaaagaatgtnctnaaagntggatgaagatgtcatttggccatt

SEQ ID NO: 200 - DNA, 308 bp, Homo sapiens
gttcgacacaacccgaccagcattccttcctgataagagacccctgaccatggagtggctctgactagcctatggaggctgcacacagacagtcttcgcatccttggcttcaccctctgacatatagggcctactgtaatccatttaaaggttaagtctccaccccagcgcgaacatggatgcatgctgcacacaattagccaattatgcatgtctatgcttcctctttgtgaatattcatagctcctcctataacctgttgaatatgtacatttggccacgctgttcagcataaatccctgtcttcc

SEQ ID NO: 201 - DNA, 361 bp, Homo sapiens
  misc_feature (1)...(361): n = A,T,C or G
actgagaataaaggcaactgctgggtgtgatagctcgtgcctgtagtttgggaggccaaagcaagcagatcacttgagccccggagttggagaccagcctggataacatcgcaaaatcttgtctctacaaaacagacaaaaatgaggatcgcttgagcccaggaggttgaggctgcagtgagccacgtttgagccactacactccagcctggataactgagcaagaccctgtctcaaaacaaaacaaaacaaaataaacaaacaaaaaaaaaaagggccngngnggccanttaanttggnantnanccaggnnnaattngttnaaangggggggacnccnaatntnnttttttttttattc

SEQ ID NO: 202 - DNA, 333 bp, Homo sapiens
  misc_feature (1)...(333): n = A,T,C or G
gccaagaaaggtaaaggcctcttgggcctgtgatcaaagagtcaacacttaaggttttggcgatgctggtaatgatgaaataaggcaacactggggcaaacactgttatggccaatgacctatgcatccaangcagcttcttcagcttcaagttgggacagtcgagcaccaagaagaggatctacatcagcgtcttggtactggtggtgacaaagcagcaatctgcctgaggctctgcaagcctacaacattctttttaacatccccaagctggaaacacgtaaaatgtccataagccacagaaaaaataaataaagtatggcattttcttac

SEQ ID NO: 203 - DNA, 128 bp, Homo sapiens
gcggtaaaacacagaccatgaggttgaggtgccactggcggcggaggaagcggcgacctgcactgggagagattcattacttcggttttacctccggaaaaagctggagtcaagttatgcttatttac

SEQ ID NO: 204 - DNA, 475 bp, Homo sapiens
  misc_feature (1)...(475): n = A,T,C or G
tccctctgagagaagccagttgccaagttgtgagctgctctatggagaggcccacgtggcgaagaactaatgtcttctgcaacagccaacaagggccttaggcctgccaacagccatatgactgagcttggaagtgaatcttctgagccggccaacagcccgtgatcaaagccatcaagctacaaatgatcttacaaatggaacctcaaatgagctcagctcacggcttctaccgaggacccctggatcaacccgctggtccctcaattaccctagaaaattcccctctggaggacaccaaactgcagggccccttcttcacccctaaccagcaggaagtagccagaacgactgncacacggntcccaacaacaattggggnggtctggttaaaagccagaattgaaaggaggngccanttggcttcctgggtcaagtaggggctcaaaaagctgngaaactcactcatttcctg

SEQ ID NO: 205 - DNA, 356 bp, Homo sapiens
  misc_feature (1)...(356): n = A,T,C or G
tgctgacttcccacatcanaagcagaatgatcttcancccaagacacaggcaaagagagcatctaactgcttaaaatgagagcaggaatggctgttggcttagatagatggcaccccagagtcctgaaagaacttgcagatgtgatcacaggaccatctgaaccggagaaaccggggggaatggagagacagcaaaagaccggagatgggtaaatgagttccagattttccaacacaacaggaaaggtgacttacgggtctgtgtgctggttacatttaatgttgagcttcagcaaaactccggaacagatgattgaaggggctttgtgccgtatttatttaaagaaaagtaatga

SEQ ID NO: 206 - DNA, 344 bp, Homo sapiens
  misc_feature (1)...(344): n = A,T,C or G
gacctgatgattgatttagcatctttggcatccggccctgctctgcttggccatactgctgccttcaccctcagctgttgcaactcttttggccactttgtgtaactgccctgccaagccctgcttcctggctgttcaaagaaagaagtgtttcctacaggagatcacaacaaaaggatgaaatctggggtgcaggggaagggtagcttctgaagctggaaaataaagaagtaaggaagggagactgtggaatttaccagggagggaaactaatatttccttttcatattaagttgntactattctggctttttaccatgatcatatattatattcaaaataaa

SEQ ID NO: 207 - DNA, 241 bp, Homo sapiens
agacaaggccctgctctcccatccaggctggaatgcagtggtggtgatcatagctcactgcagccatgaattcctgggctcaagtgatcatccttcctcatcctccagtgtagctgggactataggcacatgccagcatgcccagctaattgaagaaaaacattttcagatgaaattgttgtacatatatcttcaagtgtgttagaaatatacatcttgtgtattaaatttatttgctcag

SEQ ID NO: 208 - DNA, 457 bp, Homo sapiens
  misc_feature (1)...(457): n = A,T,C or G
aatcttgctactctccatcacaaggcaaagtctatcttcctttcttttgaatctgggaagacacttgtgactgcctcaatgaataggaagaatacagtggaagtgatgctgcgtggctgctaagaacaggctggaaaaggccatgcagcctctgttcgtctccctcttggaacacttgtctttggaaccctgagttgccaagtaggacatccagggctgccgtgctgtggggaagcccaaaactagcccacacagagagaccacatgaaaaaacactgacattgcatgaagagagggtgatgtgctccagctgcctaaggcttcatctcctgcctgttccagctccagaaaacctgaaggccacagcatnagaccccttgnnttaaaccattttacttgacctgttntgaactttngaccaatttnttatttttgaccaataaaaaataattttatt

SEQ ID NO: 209 - DNA, 482 bp, Homo sapiens
  misc_feature (1)...(482): n = A,T,C or G
atggtgtcagaagtgggatctgaagtagaggttgtaacgatccccaggagtgctgagtgaacaagcaagttacctgcagaatccactgtgtcctttgatctgtcacagcagctggggttcctgactttccctcttgttgcccaggctggagtgcaatggcacaatctcggctcaccgcaacctccgcctcccgggttcangcaattctcctgcctcagcctcccgagtagctgggattacagacatgtgccaccatgcccagctaattttgtatttttagtagagacagggtttctccatgttgatcaggctggtctcgaactcctgacctcacatgatccatccgcctcancctnccaaagtggngggacacaaanccnctngaccnnggctatnttgctggaaatttantaanngctggnggaaccattccaatcttggaaagctgcaaagacaacatgttaatgatcaacacctggccc

SEQ ID NO: 210 - DNA, 349 bp, Homo sapiens
  misc_feature (1)...(349): n = A,T,C or G
gtgggaaaactggggcatcagagaggccaagcggcttgcccaaggtcacacagcggatgttcgagtggaaatggaatgcaagcattcagactccagaacttgcactgtcttcagaaatggcctcaagttagtggtttgctcaggggtgaagagcaaagcaaagttcagggcctcatcccagggtgtgtcacttggcatgagggacgaggacccccatttcctctcagctgaggggaagagctctccacaatgtccccctgcacggtcctctggctaccctgacaacaagggccagctctccctactctccctggagtaaagctgggctcangaggtgctacccgtttcg

SEQ ID NO: 211 - DNA, 350 bp, Homo sapiens
atctgtcccatgatgaatctgggttgtccctgtgtgagccccttgaaccaacagattgtggcagagtgacattgcaccagtctgagacctacaccttaaggatgcctggcagctcctgcttttgtgttcctcggagtcatgagccacgaagtcaagctaccctgctggagagaccagctgaagaagcctcttgaagaggacctgagacttaaggctcagccatcccagactgtgagttaaacctccagatgagtccaaccccacctgctatctgactacagctacatagacgacaaaccacctaagtgattccagtcaacccacacaactgtaaaagataataaaagttg

SEQ ID NO: 212 - DNA, 478 bp, Homo sapiens
  misc_feature (1)...(478): n = A,T,C or G
aagacaaaagcaaatcagttttggcaagaaatgcactcagcggccctgactgggagagtgactggattgatacaaccatcagttctattcagattatggaaatccagcaaataatagatcatcagtattgcattcaaagcctccagtgcggatctggaaattataattacaatattcctgttaataaacacacacccaccaatgtcaagttctctctggaaataaacacaacagagccattgatagtcttccagtgcaaattcacccttggaaatatatgtttccatagtaaaaggggaaccaaagggatggaaagccacagagaaatctcccaggagatgacacagggatatcaagcacatttggagcctcctggaccccattttttnaacagatngttccatttccgggaagctgcccggatttagctgctgtcaactgatccttattttgctgggatattcttcaccgattactt

SEQ ID NO: 213 - DNA, 472 bp, Homo sapiens
  misc_feature (1)...(472): n = A,T,C or G
agatgtggtctcactatgttgtctagactggcctcaaactgctgggctcctgcgatccacctaccttggccttccaaagtgctgggattacaggcgtgagccaccatgcccagccgcttcatctttctttactcatggtggccccattattgctgtgaagcctttttctaatgttcattctctccctctgcaaagtgggcaacagtgaagaaactacatgattttcagggaatataagcatggaagatggactaaagaacacagcaggccgggtgcagtggctcacacctacgatcccagcactttggaaggccaagntaggaggatcgcttgaggctangantcnaaaccngcctnggtcaacataaaaaagaanccngcttttcnaaannaaaaaattttaaaanttaggcccaatttggggggcatncntnntngnggntcccagctgnatggcgngagggatcacttg

SEQ ID NO: 214 - DNA, 147 bp, Homo sapiens
gcggggacatggaggcccacggagtacctggcaggcccacagtccacaggttggaaagaggtgcccaagccctgggctttaagcctgggctctgaccttcaacgtttgcttttcacaccacacatcatgtcaataaatagttactgg

SEQ ID NO: 215 - DNA, 338 bp, Homo sapiens
tcaacttgctgaaagggacaacattctggaccacgcatgtaaccttggccaccatgctgactctcctggatgggctgccatcagggatcataggtctcatgagcagactgtcaccggatgacggactgaaccccaacaggtgttcttgctgcatctatgcaccgccagaacccccacacctcccattcttcaaatggacgtacagctttctccttaagtcaataaacttgaaaaagttgctttataccgcttgagtaagtggtcagcctcataaggaggagacaactgtgaagataaatatcatgaaaacaaaacgagattaaattataactagacat

SEQ ID NO: 216 - DNA, 363 bp, Homo sapiens
  misc_feature (1)...(363): n = A,T,C or G
gggcattnacataagccatcatntnccntgngacctgcacgtacncatncagatggccggntnctgccttaactgatgacatttcaccacaaaanaagtgaaaatggcctgtncctgccttaactgatgacatggacttgngaaattccttctcctggntcatcctggctcaaaagctcccctactgaacaccctgtgacccccactctgcccgccagaagaacaacccccctttgactgtnattttcctttacctacccgaatcctataaaacggccccacccctatctccctttgctgactctcttttcggactcaacccacctgcatccagntgaaataaacagctttattgctcacacc

SEQ ID NO: 217 - DNA, 236 bp, Homo sapiens
  misc_feature (1)...(236): n = A,T,C or G
atctagaagcaataaaatgggcttaaggaacacggaataaagggagcaaccctgtgaagaccacaaaggcagaacagtgacagcagctcagcagcaagactgctgggcaccgggcctggctctccaccacctgactgggtaacttttcaaacaccttcatttcccaagaagtaggaatgntgggaagactaaataaacatatgtcaagtacttaattacctgcccacatagtaaag

SEQ ID NO: 218 - DNA, 377 bp, Homo sapiens
gtactcacaagctacaatgtaaatcagtaaagaaagagataactataccagaatatggagcctattgataggactcacaagattcaaggtgccttgtccaaacagatgttcattgctctttgacacaccttaaataagagttctgtagttaaacaactttggaaaaagaggtgtactctcaccctcccccatcataatgaacatcagcatgaaggctctaagaagacccacagcaaagaagccggttcagttatttttaatctgactcttcacaaacttattttacaccaggtaactttcaaatcttcacagaactaatgttttgtgaaatttactttgaaaaacatcgtgctagaaataacattattttgctatcc

SEQ ID NO: 219 - DNA, 356 bp, Homo sapiens
gggcattcagataaagccatcatatcacctgtgacctgcacgtacacatccagatggccggttcctgccttaactgatgacatttcaccacaaaagaagtgaaaatggcctgttcctgccttaactgatgacatggtcttgtgaaattccttctcctggctcatcctggctcaaaagctcccctactgagcaccctgtgacccccactctgcccgccagagaacaacccccctttgactgtaattttcctttacctacccgaatcctataaaacggccccacccctatctccctttgctgactctcttttcggactcagcccacctgcatccaggtgaaataaacagctttatttg

SEQ ID NO: 220 - DNA, 436 bp, Homo sapiens
  misc_feature (1)...(436): n = A,T,C or G
gggcattcagataaagccatcatatcccctgtgacctgcacgtacacatccagatggccggttcctgccttaactgatgacatttcaccacaaaagaagtgaaaatggcctgttcctgccttaactgatgacatggtcttgtgaaattccttctcctggctcatcctggctcaaaagctcccctactgagcaccctgtgacccccactctgcccgccagagaacaacccccctttgactgtaattttcctttacctacccgaatcctataaaacggccccacccctatctccctttgctgactctcttttcggactcagcccacctgcatccaggtgaaataaacagctttattgcttcacacaaaaaaaaaaaggccagggaggccanttcanctnggacttaaccaggctgancttgntcaaaagggggggacc

SEQ ID NO: 221 - DNA, 441 bp, Homo sapiens
  misc_feature (1)...(441): n = A,T,C or G
acctgcctttcatcttcagccatgactgtgaggcctccccagtcatgtggaactacggactcttgctctatcaccaggctggagcacagtgacgcaatctcggctcactgcaacttccgcctcctgggttcaagcaattctcctgcctcagcctcctgagtagctgggattacagagtcataagaagaaacggtgatgcctgacaacttggtaaaacctgagacatgaacattgagtcctggactcggattgtctggctctcaggacaggatactccagaattcactctgaggcctccactgggcagtcattggtctgctaagaacatcacaccgngggataaacttcctggaagtcataatttaaacatttgagttttccttttaccccagcaagggcctttatgttggctcacaaagcaatgtaatgacaatcttgctt

SEQ ID NO: 222 - DNA, 443 bp, Homo sapiens
  misc_feature (1)...(443): n = A,T,C or G
gtgaagttctgaggccaagaaagggtagctgatttctccactggtgacagaatttcgctcttgttgcccaggctggagtgcaatgacgagatcttggctcactgcaacctccacctcccaggtttaagtgattctcctgcctcagcctcccaagtagctgggattacaggtggagtcttgctctgtcacccaggctggagtgcagnggagcgtgatcttggctcactgcaagctccgcctcctggttcacgccattctcctgcctcagcctgcggagtagctggaactacaggaagaaaaatggncttanaangggaaaaccanttgcanccaagatccaaattaataccaaggnagccggggagaanaaagaaccntggtggaagaagagtgaaaaagcnttgtcttttgggggtgaattgcagaaagaaaataaattattg

SEQ ID NO: 223 - DNA, 436 bp, Homo sapiens
  misc_feature (1)...(436): n = A,T,C or G
gggcattcagataagccatcatatcccctgtgacctgcacgtacacatccagatggccggttcctgccttaactgatgacatttcaccacaaaagaagtgaaaatggcctgttcctgccttaactgatgacatggtcttgngaaantccttntcctggctcatcctggctcaaaagctcccctactgagcaccctgtgacccccactctgcccgccagagaacaacccccctttgactgtaattttcctttacctacccgaatcctataaaacggccccacccctatctccctttgctgactctcttttcggactcagcccacctgcatccaggtgaaataaacagtttantggctacncattaaanaaaaaaaggcccnggggggccnttccggtnggaattaacccgggtnantttngttaaaagggggggcca

SEQ ID NO: 224 - DNA, 457 bp, Homo sapiens
  misc_feature (1)...(457): n = A,T,C or G
ctatgaagagcagcccgctgtgggagacactgatggccctcgctgactctagagtggagtgaattgctaccttgctgaccaggaaatgatcgatgcctggcacctggcagtgaatggggcgtcctgcgatgatccgaacacgcctgttctcagaaatttgcagcacaatgttgttatccaagacatacaatgaattgtccataggatttactgcaaggtctgttggccactctaatcgcacctgtgaaacgaacagaacacataccattaggttaccatgtctttccatggacagttttaacttgaaaaaaagaaaaaaaaattggtgtattgnttcccccgtcttatgaattttaancaccattgggtgatgtctcggaaagtggagggcagggggaggatggttaatcacatgttctggtaaacgtacttatcatttatgccatttacaatataa

SEQ ID NO: 225 - DNA, 105 bp, Homo sapiens
  misc_feature (1)...(105): n = A,T,C or G
cagaactgaggacncagtgnncatgtaactaactcctggntaagaggatatgggtagaangcacanggngcnacttccnggcttctgctccttgaaacacagtaa

SEQ ID NO: 226 - DNA, 427 bp, Homo sapiens
  misc_feature (1)...(427): n = A,T,C or G
gggcattcagataagccatcatatcccctgtgacctgcacgtacacatccagatggccggttcctgccttaactgatgacatttcaccacaaaagaagtgaaaatggcctgttcctgccttaactgatgacatggtcttgtgaaattccttctcctggctcatcctggctcaaaagctcccctactgagcaccctgtgacccccactctgcccgccagagaacaacccccctttgactgtaattttcctttacctacccgaatcctataaaacggccccacccctatctccctttgctgactctcttttcggactcagcccacctgcatccaggtgaaataaacagcttttattggctcacacaaaaaaaaaaggccagcgaggccaattcagctnggacttaaccaggctgaacttgctcaaaagg

SEQ ID NO: 227 - DNA, 315 bp, Homo sapiens
gagacctgagccactaagtaagaagtccagttaccctgttggataaaccacatggagaaggaaaggccctgagatacttggagagagggaaaagtccagctgcccagcacctgagctgagcccagcctcagccaaccccaccggctgactgcaaacacatcagtgaccaccagtaagaccagcagagctgcacagccaagcccagcctagattgcagaattgtgagcaaataaaatggatattgctttaagccacaaaatattgaaatgttttttaaatgtagaatgtgatttctaagaataaaaagttgcaaat

SEQ ID NO: 228 - DNA, 415 bp, Homo sapiens
  misc_feature (1)...(415): n = A,T,C or G
aaccaaaccaacaccggagaagctgagcaaatgcagtcagttggatgtgaattaccttttagttgctgacaacagaaagttaccctgaaccactgaccaagggatgaaaagcgtccgtgtactattagtaattctcagaatcatctctgtccccaaccaagtatggaaagccaagtacagtatcatggaaccaaattcaaatgctggtctcaaagttcccgacttgcttgccttcaagtgccacttgagagattttaaatgacagtgaaatgctttgttcaactaaaaattcaaagtgtcgggacaangtttatttctgagactcaagagatagtttttgctttagttgntgccattggngntgntggggngggggaaaaaangncagaaaataaaatctgccacttttcttttc

SEQ ID NO: 229 - DNA, 350 bp, Homo sapiens
  misc_feature (1)...(350): n = A,T,C or G
aattgtgacaggctcccaggacctaaacccagaaggaagcaggaccatattgctgcctagagaaggggatggagcagattccaggacaccgatgaaacagaagcttccatcacagtgctttctgctaccttatgagacagttcgcatctcaacagctctaggatacaaaggaagcacatacatttatactttataaggtggccaaggaatcctactgtgaacaaagaatttctaagataataaaatcccactttttttttctataaaaagcaaaaaaaaaaaggccagcgnggccaattcagntnggacttaaccaggctgaanttgntnaaaagggggggactacccaa

SEQ ID NO: 230 - DNA, 91 bp, Homo sapiens
tgacacgaaaatctggttctcttgcactaatatgtgaacttatggacatgaatatttatgagctaatacgagggagaagatacccattatc

SEQ ID NO: 231 - DNA, 285 bp, Homo sapiens
ataaggaaagcgaagcacagagaagtatctgcccaaggtcacaaaccagtggagcaggatttgacccaaagcagacagtcggacttcacagcccgtgctctcaacatccaactgctgaagagttaacaatttacccttgacagccgctataagcaaaggtaaatgctcaactgctaggaagggacagtcagaacaccgtcccatatccagtatccatgtctctctgtttgtttatggcctctatgactttggcaaaagaagtacacacaatctgattttccgaac

SEQ ID NO: 232 - DNA, 71 bp, Homo sapiens
atggtggaggattgctcaagcccaggaatttgagaccagcctaggcaacatagcaagacctcatctctacg

SEQ ID NO: 233 - DNA, 155 bp, Homo sapiens
  misc_feature (1)...(155): n = A,T,C or G
ntataatggctanagctggaaacacatcatgtatncaganggaaaagggcaagaagattgcaggatccacagacctggtattcccaaacagctgaaccagtntcagtacacctctggatttcccattacttgagataaataaactctttcttttt

SEQ ID NO: 234 - DNA, 428 bp, Homo sapiens
  misc_feature (1)...(428): n = A,T,C or G
gtatcgatcgcaagagtgcccccaatcaactttctgcaagcaaatctctgtttcatggagaacctggcctgcaacatgacacctctcaccacatcttacgtcagcagttcctaaatgtgtgctgtggacttgctacagcagatatgtttggagaaaaaaattcatatttctcatgttcaccccacacctacaaaaccataatctccatgaatgggtcccaaggatgtgtattttttcaaagctcctcctccactgctgaatctagtgtatagcttgatgtagaaaccactgctataccaaaggctcagcctcaaatcagcctacagcttctatcttgctccatcttcgtttcagccaccaatagagnggngaagccattaaaaaggtcaaaagtaggtaaataaaatgtgaaccagtatataaaagtt

SEQ ID NO: 235 - DNA, 355 bp, Homo sapiens
  misc_feature (1)...(355): n = A,T,C or G
gggcattcagnataagccatcatatnccctgtgacctgcacgtacacatccagatggccggttcctgccttaactgatgacatttcaccacaaaagaagtgaaaatggnctgttcctgccttaactgatgacatggtcttgtgaaattccttctcctggctcatcctggctcaaaagctcccctactgagcaccctgtgacccccactctgcccgccagagaacaacccccctttgactgtaattttcctttacctacccgaatcctataaaacggccccacccctatctccctttgctgactctcttttcggactcagcccacctgcatccaggtgaaataaacagctttattg

SEQ ID NO: 236 - DNA, 381 bp, Homo sapiens
  misc_feature (1)...(381): n = A,T,C or G
gtaacaacttttaaacattcacgtgacggaccaccttccctcagccaaacaacttccctgaaaggcgcccgaaggagccttcccatccaccgcgggtgcccaggaaaggcctgtggggctctcctccccgcgctccacacgccctcgcatcccaccgaggcgccagcttctgcctgcacgttgctgaaactggcctggaggttctgacaagaattagagcggcggccgttgccccggggatgacctggaagcgaaagagaccggcacgaattctagagtttcggggtttccgcgggttgagattgtacgggaaacaatgcattaaccaaacctaaaaatcaaacaaacaccgtctggnagaaccttaccattaaaaagctt

SEQ ID NO: 237 - DNA, 449 bp, Homo sapiens
  misc_feature (1)...(449): n = A,T,C or G
ctcangatccatccatcctgcctgtgctccctggttcgttttccctccagccactgccaaatgccaggacacaagtcaccacctcccctatgcttagccttgtcatcctccatgtcattgaggccttcacgactcccactctggaaccaagcaatcaaggcctctgaattgcactgttgcactgaccgttcacctccttactgtctgccttatgcagagtgcaagctctgtgaaggcagatgcctcgcctgagtggtttccagctgcccccagagcacctagaagaggcccagcaaatagaaggcactccatgattatttgataaaagaatgaatataacccaacactttatggctccccataactggatgcccccctccccatggtcagatcctttttatatttggtggacatgacagaaatnaatcttccaaataaatgaattctta

SEQ ID NO: 238 - DNA, 366 bp, Homo sapiens
  misc_feature (1)...(366): n = A,T,C or G
gctaacctaggatcagcacaatcagccagcagcaccatcatctcaggctgtagcagcaccaagcccttccagaaaagcccggactttccagaagcatcctcagcaagtgtcacaaggaaggaagccagaggctgcccatcgcatacctgaagagagtcaacctagtctccttaaacatttcttctgctccacccctgaaagaagcaatgattaaactttgaagccctgtatatcttaataccttgggaacatttgctatgtatatcctcattaaatgaaaacattgcaacggcaaaaaaaaaaagggccggggggnccattnannttggnnttnaccngggngnanttngttaaaaggggggggcc

SEQ ID NO: 239 - DNA, 370 bp, Homo sapiens
cagccctaacagactaagacgaatactaactgagaacccaccagacttggagaaataaaccccttttgactgagccaactgaggctgctcttgaaatcaaaatctatcataaagtaagagtgaagctgcagcgtgggtctacctaaaactcaattcaagaaattcaagagaagagaacgctcagctagagtgaaccaggagactgcaacaatcttgttcatttggttattcacttatttaatgtctgtattttgtagatctagattaatgtgaatttccttagaacttgcatcttggttggtttactcagtgctatatccccaatgtctgacatagtacctggttctcaataaatactttgaaacaattg

SEQ ID NO: 240 - DNA, 305 bp, Homo sapiens
gcctgaaacacaagcacaacacactgaagctaccatggatccccttggcccagcagctgttacaccctaaatgatattctcttctagcacttccttaccctgtggtcttaatctgaaggcatctggactcttcttcctattggtagaaggatcacaatatggtgcataaaacctattttatgtaacagcccagtggacctgaagcaacacttcatagccaagtacattcatagttcttcaacaaaatgtataaatttcaccccttgttgtaataaataaagacaataaataaatagcctcccatt

SEQ ID NO: 241 - DNA, 448 bp, Homo sapiens
  misc_feature (1)...(448): n = A,T,C or G
agctgctcttacatctaatgagaaaaaaggttctcactgcatccttggtgtctctcagatgtttcttcagatgttcagagcctgggagcagtaagtgttcaaaaaatggtgtttaagggtctcactccaacacccaggctggagtgcagtggtggtgtgattatggctcactactgccttgacttcccaggatcagatacgggctttcactgtgttacccaggctggtcttgactcctggacttaaaactatccaccagcctcagcctcccaaggtgctgggattacaggtgtgagctaccactagtggcctcttctaagaggaaatttggatatacagagagacaccagagatgtgggggcacagaggaaagacctgcttggatacagtaagaaaggcagcctctgcnaacntaagacaaagtcctaagaaaaacccaactgctcca

SEQ ID NO: 242 - DNA, 511 bp, Homo sapiens
  misc_feature (1)...(511): n = A,T,C or G
ttttttattttcttatttnctttttattttttntntnggggatnntgnaacntnnanttnggactactgcttaagtcanaactgaggggcattcanataagccatcatatcccctgtgacctgcacgtncacatccagatggccggttcctgccttaactgatgacatttcaccacatnaagaagtgaaaatggcctgttcctgccttaactgatgacaatggncttgtgaaattccttctcctggctnatcctggctcaaaagctcccctacttgagcaccctgtgacccccactctgcccgncagaagaacaaccccccttttgactggaattttnccttntacctancccaaattcttanaaaacgggncccacccctaatnttccctttgcctggacttctcttttttgggactnaggcccaccttggcattncaanggtggaaataaaancanncttttttttggctctccnccanaancaaaaaatanaaataatatagctctga

SEQ ID NO: 243 - DNA, 425 bp, Homo sapiens
ggtctcacttcatcacctagactggagtacagtagcacagttgcagcttcctacatcttgacttcctgggctccagtgatcctcccccttcagcctctcagcagagagagaaagaaagcagagctctttgaagcagagaaagaaagcagaaagcagagatctttgaaggcttaagaaaccataaggagttttggagagtcaatgcatgatgatctctgaagattctactgaaatctaatcaatatgtcctcactgccatcaattcaaaagaacttgctaagaaggctctagaggcttgtactctcagatagtgaaagtgagatgatgtgtagtgaaagtcatatataggttgtaaattgcaatatggaattcccaaatgctgaattcattttatctcttcggaaataaaaacctggtaaagactc

SEQ ID NO: 244 - DNA, 208 bp, Homo sapiens
  misc_feature (1)...(208): n = A,T,C or G
gagaaatttggacacagacacangacatgggggaatgccatctacaagccaagaaacacctaagactgccagaagctgagagagagaactggaacagattctccctcatgggcctcaggaaggtcctccctcaggccctcttgccggcactttgaattcaaacctgtcgccttcagaactgggagacaataaatgtcttgtttaagcc

SEQ ID NO: 245 - DNA, 256 bp, Homo sapiens
tttgagacaacctttcggggtctgctcatcctccatggcgagtcatcttgcaatgtgatctgttgcatcagacctccgtctgggatcatctttttcctgcctgaagttccagctttggaatctccctccggagggtctaccagtggcaaactcttaagtttttgtatttgtaagtgctatgatttcacctacgttctggatacatgtgcctcatactgggtacataattcttgaaatacattttcactgaatatat

SEQ ID NO: 246 - DNA, 438 bp, Homo sapiens
  misc_feature (1)...(438): n = A,T,C or G
aacgctgagctgctcttctctttgaattccaaagagacatctaaaggaagccctcagctctgaagaccacctagctggaatctcagagggagagctggggacaggaaaggatgactactcccaccattctgtggacaccgagtccagcctccgggaggacgctgagggaaccttttgggacagccagggcagagaacgccttttacttcttaaggctctggatcaaaacagagaagcttctgtttcggagcctggcaatcctcgaacatcagtgtgcattttaagccataaagcgcaatactgattacaaacaggaatacnggagggcttcctttaaactgcttcagaaaacaaactcctcggggacttcgaaaggagctctcaccatagctcctgcaatccactctgaacaggaaaccttctcatctatttattaaa

SEQ ID NO: 247 - DNA, 424 bp, Homo sapiens
atcacatgttctattttccaaagaatttgcaatccacaaaagaaacagcccaggaagcatgcggtggatgtgctaagtaactccacctccctggcgctgaggccagaaagcagacacttcctgcagctgcagttacacaacgatgttctgtggatttttcgggcaatagttaatgatttaagacaataaaatcctgtgccctcctgaatccgtgggcacttccctttgcaccacaaatgttggcctctgtctctactgcagccacggtggaaacagagagcaggaaaaagagcttggaagaggaaccctgaagaaggggtggacaccacgcatcccagacttctacacggctagaaacacccctgactaatattattactaaagtgtatacatggtggcaggccctgttctaggctctttacaa

SEQ ID NO: 248 - DNA, 194 bp, Homo sapiens
gtaaagccattgaagcacattgagacaagagggaccccagagggaactcattcaccttctttccaacgggtgcgggtacagaagtctgcagcctgcacacggaagaggaccctcaccagagcctgaccttgctggcaccctgatcttggacttctggcctccagaacattgagtaatacatttttgttgtgtat

SEQ ID NO: 249 - DNA, 300 bp, Homo sapiens
caattgcttgttcagagctcttggggatcaattggagggacactcacgaaatcatctcaagcacagacaggagacagtggactacatgataaagcagcgggaagattttgaaccctttgtagaagatgacattccttttgagaagcatgattcgtggtacagagaaaagcagcgtgagggagttacacatcgcatatcggtatggagagcactacgacggtgttcggaggatcaatgacaactcaagaggcacctgcacatctccagacggattttcagatgcttcatcaagatgaagtc

SEQ ID NO: 250 - DNA, 471 bp, Homo sapiens
  misc_feature (1)...(471): n = A,T,C or G
agtctcacggttgcccaggctggagtgtaatggcacgatcatcgctcactgtagcctcgacctccatgggctcaggagatcctcccacctcaccctcctgggtagttgggactagaggttgcatttcttttttctggaagcacatcttttaaaagatatttacatgaaggtctaccagacatgaaattggagttctagaaagggagaagatgaggatggggaagaaacaatatttcaagaagaaatctctcaagaatttgccaagtctgacccaaaacatcaagcagttgatttaagaagtgtataagcccaagctgggtaaatacaatgaaaaccacactttggcacaccagagtcaaactgagggaaatcaaaaccattattaaaccttggaaatcccctttncnttnaagcacctncattaagataaatagctaatttcctaaaacaaattatgggaagccagaacca

SEQ ID NO: 251 - DNA, 614 bp, Homo sapiens
  misc_feature (1)...(614): n = A,T,C or G
ttcttggggggaggcttacncttggcatttatagcttnaggcaannttggaggaggggaaggacccccttnccccaaagggggaaccaaggccggaaggaccccccaaaggttccgggattgcccacccttggccaaagganaggggtttttantttggggggtaacaacccgggggtaccccccggggccggaaatttcaaantctaaaattccgggaaggggaacttggccgccncccccanattggaanggggggggtttgtgggggcctcttttttattttgaagccttccgggggggaagccaanaaaaaccgccgccgaaaccaagaaacctaagaaaaccgaaacttggatttgctccccttagcaaatccgcattcattcnggtgcccaaggggaccaccgccatttcatncaagatgaaaccgtgggcccnaaggtttgacaaaggggtccacaaggcagggtttanatgggccccgtttaaaaacttatgcttnttnttgcggggggcccattctntaaggaatgggggnggggtcaanaatgaattccntttntttccnaattggggccnaaggnccgatggggcattcttttttaaaaaaaa

SEQ ID NO: 252 - DNA, 546 bp, Homo sapiens
  misc_feature (1)...(546): n = A,T,C or G
ttacatccagagcattccagttgttaatgaagaacacagaggtgatttttcctatattggaaatttgatgacaaaagaattcataggtcgacaattgattctaattattaagtctttggataccagtgaagaaggaggaagaaaaaaactgctggctgttttacaggagattcttattttacccacaatcccaatatccctggtttcttttcttgttgaaagactactccacatcattatagatgataataagagaacacaaattgttacagaaattatctcagagattcgggcgcccattgttactgttggtgttaataacgatccagctgatgtaaggaagaaagaactcaagatggctgaaataaaagttaagcttatcgaagccaaagaagctttggaaaattgcattaccttacaggattttaatcgggcatcagaattaaaagaagaaataaaagcattagaagatgccagaataaaccttttgaaagagacagagcaacttggaantaaagaagtccacatagaagaagaatgatgctg

SEQ ID NO: 253 - DNA, 474 bp, Homo sapiens
  misc_feature (1)...(474): n = A,T,C or G
agcaatatactgaaatccaagattgagaacagcaattctgagagcaaggcagtcatctgagtccaccgccttccagctggcccaccttatgaaagaagcaaaccctgagggcgtggaggagagaagaaactgctgtcagctttcccatcacacaacttctcaggcagtgctggcgctctcccctgctcacttaggacaaaccaacacttttggaatctgactgtcaaggagagtcacatggcaccgcgtttaacctcagatcccaagcctccaaatggggtgtggtttctccaaagggctcatgagactgatgtgtgaggacatgaggatgacatccggttggtgtggccactagaggaaatgccnttttaccnaggacaggaagnaggggggcccaattttcntttccaacatttcaaacaacaaggngtatgtccgacccccgattcaactttcacaaacctgcacttaatc

SEQ ID NO: 254 - DNA, 496 bp, Homo sapiens
  misc_feature (1)...(496): n = A,T,C or G
gtattacacganccccaaaccagaacgtctatgtggttcaggcntgccgcaatggaaaaaactttgacttctaattaaacacctgaaaccaatgaatcctcctcttggaaccaataagactgggacatcatcagaacctgaatgacaaacttttggaagccagggtctcacgctgtcacccaggttggaatgcagtggcgcgatctcagctcattgctacctctgccttctgggctcaagtgatcctcccaccacagcctgctgagtagctggactacagagttgcctgcatttcagcagtggatttaagcaacctctatgtaaaatattgcagcatgctgagcttaagatatttcttgnttcctgctttaatctaaagctttgnaccaatgatgantaactnggaaaaagaaggccttttccaagggacatcgctcactgncctgatgcccgngcagtgnacacttaccgactcagntttccaaagatcctcaat

SEQ ID NO: 255 - DNA, 377 bp, Homo sapiens
  misc_feature (1)...(377): n = A,T,C or G
ttcgtgtttggttaaagagagacagtggacagtattggccaagcgtataccatgcaatgccttctccatgttcatgcatgtcttttaacccgggaacaagaagactgtccataggtctagacaatggnacaatctcagagtttatattgtcagaagattataacaagatgactcctgtgaaaaactatcaagcgcatcagagcagagtgacgatgatcctgtttgtcctggagctggagtgggtgctgagcacaggacaggacaagcnatttgcctggcactgctctgagagtgggcagcgcctgggaggttatcggaccagangctgtggcctcaggcctgcaatttgatgttgaaacccggcatgtgtttatcgg

SEQ ID NO: 256 - DNA, 245 bp, Homo sapiens
ctccagcaacaactgtttcttgtgactttctgtgggactctgaggaatgttgggatgataatcacaggaaccaatggctgcctctggaaagcccataattctgcacattcatggagcttcactctgattccaaatccagaaagaccaccatgtcacttatggagacacttgaaatcctttccacatcttcactcatcacgcctggggtgagaactaggaatacgtgaataaaccaataacacgtt

SEQ ID NO: 257 - DNA, 721 bp, Homo sapiens
  misc_feature (1)...(721): n = A,T,C or G
agtcaagaaaacttgnnggggcccggaacncctatnttgtncagntgggcnctntccttntgggntanttanaaccctntnnggagacttttnatgctgggtggttggggacccattttaannggccnttngaggggtttttttttnttaaagggttannttttnaaaccgggcntnggtnggggttttnggccngntttttgaacaggtccncttaaaaaaccagaagggcttgccaaaaagaaatggcttttngnaatgggcattccggctttcgnatnccttgaaaaattnccggcaaaacacttacgacttaggaagntttgcttaanggccaaacacgaaagatgggcccaaagaaaccaaaactcgtaagggggactttccaaaaccccaagtacttctcttgcccaaacacttgtacctcaagtttcatttgcccaggaagaagccatatgaagcctcacaagtggccttgcactttaccccaagtaagcccttggaaagtggtgggggcccccgtacccttttgtacccaagccggggaagttaagccgccttgctcttaccttccttccttgggtttcacctatncccgcttcacttggcattgcccaagggggtttcttntttcttggaggggcaaaaagccccaaccaccaccctggtcttttttgggcccactttctttccaagccnaaaaattaagatttgggctctt

SEQ ID NO: 258 - DNA, 345 bp, Homo sapiens
  misc_feature (1)...(345): n = A,T,C or G
accgtggccccatctattatttttgaagaggaaaactcctggngccaaaaagtccaccgatccttggttcagacaaggacttccaattgcttaatgtcagatgaatactgaaaggtcaccagaggatacaccacggaacacagggacaccatgactattgaagtgttgaagattccagatgaaacgttttttaaaatgtaagcctacactgcagggcatggtgttgtgcctggagtcccggctacgtgggaggctgaggtgggaggaccccttgagcccagaaattctagtgcaacctgagcaacacagtgaaacctcatttttaataaaatattttttaagcct

SEQ ID NO: 259 - DNA, 308 bp, Homo sapiens
gatttcttttcaaaagtgaactttggtgtagcctctggtctggggcggaagatgagaatgagagggcagcctgacccccctcctgataaggaaggacccagcgcataacctgttcaggatctggagccgcacaaacacctgactcgccccttcaaaacaagatccgcggaatggctcgggacacaacaagaaattgccggcaacctgtgacggctcatttttaccgacagtgggaggcgggcagtcggaaggaatgcccatttctccggtgttccttcccagaagcaaaagaacgtgtttgtttatgc

SEQ ID NO: 260 - DNA, 517 bp, Homo sapiens
  misc_feature (1)...(517): n = A,T,C or G
ctgggagctcctgcgtgagctcntgnnttangttagaantgcggtgtgaccacaccaggccagggaagaaacacgtgcccagcctgccatctgccctcctgtcttggagccaggtctttccaccagcttccttcatcttttaacacttggtgaaaaggaatgacacgtcagtcaaagcccctggccggtgctcatggagcatctggcaggaggaagccccttcctggctggcctcccattcatcagtcagcgccgcaggctgggccagggacagctgtggaacctgagctgggaggcagctgtgaaaggcaagaaacaaggaaaggggacagaagtcacccggtcggtgagccagctcggaggcaggcagagaaagcaagagaaggggcctctcctgccgtcatcctaacctcccaggtcctccccaaaggctcccaacccttcccaaacactccccagtctccttcctgtccccaccaccatccctntggccctgatttacaagctgggcagtcac

SEQ ID NO: 261 - DNA, 94 bp, Homo sapiens
ggcagccccatgaatatgaagatacttggaaagtctttactacagagcatgatttcaggaatgatgaaacaataaatgagaatctggtattaat

SEQ ID NO: 262 - DNA, 342 bp, Homo sapiens
  misc_feature (1)...(342): n = A,T,C or G
ttaagtcgaactgnggagaggaanagaaagacagagtnntgttctgtngngcatgctggcgtacagtgccacaatcacagctcaccgcagcttccaacttctggactcacatgatccttctgcctcagacttccaagtacttgggactacagtcacgaatcaccacanccagcttggannganttttttangggnaaanaccagtcaattggaactggaattatatgacttggggccaaaataactgtggtcagctgacttgttaccgtatttaattttaattttggagcttgtattcaaaagctattatatgaatataagaataaatgatttttttaacat

SEQ ID NO: 263 - DNA, 520 bp, Homo sapiens
  misc_feature (1)...(520): n = A,T,C or G
ttaagttagatgtntggnnaggaagngaaagacananacatgaanggagganggnccnagnnnggacnncaagatgccatctataagccaaagagaagcctnagangaagccaaccntgctgacaccttgttcttggacttctagctttcagaactgtgggaaaagaaatctgttgagtcatccagtctgcagtactttgttatagcagcccaagcaaatgaatataccttccttgactacttcatcttataacgtgcaaatacctcaacttcagcaccatttacatgtttattcactgcctttattggtagtcatttgtgtcttccccagaagactgaagctattaaaagactgataatctatttnatatcttttggnattatcaagctcaacatggtatcttcccacaataaaaatttgactttctgtactcttccttccattaatgcccgagtgaaaatatggctggtagtggtttgctgaagtaaagcggattctcctgcctgaaaaaaaaaagaa

SEQ ID NO: 264 - DNA, 566 bp, Homo sapiens
  misc_feature (1)...(566): n = A,T,C or G
tgtacaactgtgatccaagtcaacgtcagccataaatccttcttcaaaaaattcactggatacctagaagaaaatgaaacacctttactgttacattatggtacctagcctccaagaagaccccgttgttccccactcttggtattcacacctttgtatagttccctgctcactataccanagcgggtctgcgtgaccataaagaagtgcggaagtgtcggcgcatcgtttctgagactagtttataaaaggctgcagctcccatctctctcagatcacttgctctgggggaaaccagccaccatgcagtgaggacattcaggcaagcaagcacccaggtgatgaggagctgcatccaccaactgtgagcgagccccgagctccgcagccctggccgacagcctgactgcagccccaggagacgctctgcgccagaatccaccagctgagctgctcccagaccctgactcgtaggaactgtgagatcatcaatgtttgttggttaaagctgctaagttttggggtcacttgtgacacagcaacagataatattcttccctaataga

SEQ ID NO: 265 - DNA, 334 bp, Homo sapiens
ggccgacaagggagataaattccgtaatgggagctgcggccctgctctcctgtcctggtggagctttggctgatggaaaggattcagttgcctgtctgaacagtgactaccatgaactctacatgctgtctacttctaaccctctttggcctgactccagcttcaacacctggaaacatggcaaaaagaacagggggacattggcttggactggagccacgtgtcagagtttgactcaaggatagttgatgtagaatgaagagaatgagcagggaacaagaggtataaatgtgcatgatgtttattcattcaacaaacatcatttgagcccctg

SEQ ID NO: 266 - DNA, 338 bp, Homo sapiens
  misc_feature (1)...(338): n = A,T,C or G
tcctgtttgagttnatntgagggccaggaagggaaggacaaacctccctattaaagaaatccctggactggaaaggactggaacattgggagtggaagtccacattagcggaatagtatgttctgaaggcatttgagcagatgaaaacctgatacatgagacataaaacctgaggaaaattatttcatgggaacggtaaaaatggtggagagggtaaattgggcaagggagaagaacggaggagagggagagggaagtgctgctgaacttatttcaaagaagaagaagaaaaaaaatgatctcttgtttttcattaaataatggatgctctccaggcc

SEQ ID NO: 267 - DNA, 432 bp, Homo sapiens
cctactcagttagaagatgacaaggatgaagacctttatgatgatccacttctactcaatgaatagagaaatcagcaaaggacggtgtgcaggccagctcccttctcaagccatgtggttggcagaccctgtgggagccttccgggacccacccttccatcctctgcacagccgctaaaggagggtgaggagcccacaccagaactggtctgcttgtgagatgcctgaagaggacagtcccagttgattgtgttttcttaactgtagactctaatctctccaggtggaatcttaattgaggctggccctgccagggcatgtacagggtcctgggaattcaacagaatgaattcaacagaatgcatgggatctgatgtcagaaatgccttgcttgtattctgaccatatcacatatgagctatgtggtgattt

SEQ ID NO: 268 - DNA, 255 bp, Homo sapiens
gctggagtgcacaatcacagctctctgcaacctcgacctcctgggctcaagcgatcctaccacctcagtctcccaagtagctgggactacaagtgtacatcaccatgcctggctaattgattgtcaatttttgtagagatggggtatcaccatgctgcccaggctgccaagtctttatgtactttccgactcatcaaaagactaaattatgttcaatactattttagcattaattaaacatattttgctatattg

SEQ ID NO: 269 - DNA, 428 bp, Homo sapiens
  misc_feature (1)...(428): n = A,T,C or G
gacggactcttgctgtgtcacctangctggagtgcagtgggcgcaatctcagctcactgcaacctctgcctcccgggttcaagtgattctcctgcctcagcctcctgactagttgggactacaggcacatgccaccatgcccagctaagttttgtatttttagtagagatggcgtttcgccatattggacagactcctgaccttatgatctgccctcctcggcctcccaaagtgctgggattacaggcgtaagccactgtgcccggccatgcattcatttcttacacgtatcattgttgttttaaaagtgaaaagcctaagaagagatgttaggtttgcttgttagggtaggattaatttctaggtacaccaagccaaatttncagtcctgctgntaacacccaacttcttgngaacccttttttttt

SEQ ID NO: 270 - DNA, 286 bp, Homo sapiens
gttggagtgtagttgcgtgatcacagctcactgcagcttcaatccccggctccagtgattctcccacctcagcccccgagtagctgggcctacaggtgcacattacaacacccagctagtttctgcagtttttgtggagagatcgtttcaccatgttgcccaggcatttctcaaactcctgtactcaagcaaaccttccactttggccccaagtactgggattcaggcaagagccaccgcgtctagccaattatacaatttttaaaataaattgaaatggtcgttg

SEQ ID NO: 271 - DNA, 285 bp, Homo sapiens
gtcctgatatggaagaaactactgatgtcagctgaaggaccacactgatgcagctgtcctgaaggactccccgaggagctacctcatcaaaaaatacagtttccactttgcgatgattttatcccccttgccccaaccgaccagcaaccccagtattccagcccctcactctccacaatacccttaaaaaccctcatcccagaactccttgaggagatggatttgagggtcccttctgtctccttgcttggccacccctcaatcattaaactctttttctgctgc

SEQ ID NO: 272 - DNA, 326 bp, Homo sapiens
gctgtggtaccagtggtatgaagaagcaactaagagaacccaatggatgagttcctctgtttcagtaaataatcaaaggcaacatctgagctggataatgaacaggaagaaaagaccaccaagtatcatcattagtggaatactgactgaaatgaatcaagatctcttcctcaaccaacatgacagaaacattccaaagctgccttcatcaacctaggttctataagaaattaaagtcctaatgctctaatatatgctattataggcaatgagctcttaatcctatgcatctagaagactggctatgtatcacccttgggagaact

SEQ ID NO: 273 - DNA, 362 bp, Homo sapiens
tctccaaaatactaggtgtatggtgttatctttccaccactggtgaaaacaacccatggtctaggcactttggagtagcacccaccagctgtgtgaaggtcaaatggatcttaaagagttgtgcagtgggactgaaagaggagagtcactatttcagagataaccaaatgttaaaaaaaagagttttgaaaacgtggacaagcttcaaatgaaaagaagaggatgacagaggacttggaggggaagaaaacaaaaatcataatcatagacaatattgttcaccatgtacaagacagtgttctaagcagaatgagtgcctttggtgatgatacctcgtcaggaccacagtaaacttacccact

SEQ ID NO: 274 - DNA, 105 bp, Homo sapiens
ggaggctgaggtgggaagattgcttgagcccaggagtttgagaccagcctgagtcaacacagcaagacactgtctcttaaaaaaaataaataaatacttgttttg

SEQ ID NO: 275 - DNA, 548 bp, Homo sapiens
  misc_feature (1)...(548): n = A,T,C or G
acagggtcttgctctattgcccaggctggagtgcagtggcacaatctcagctcattgcagcctcgacctcccaggctgagatgatcctcccgcctcagcctcctgagtagctgggactacaggcgcgcaccaccatgcctgctgattttttgtagagacagagtctcgccgtgctgcacagactagtctcgaactcctgaagctcaagtcatctgcccacctcagcctcccaaagtgctgggatttcaggtgtgagccaccatgcccagccatattcttttttttttttcaatngnngggaaattcccntancataaaattaactttttaaacngaacaattcaggggggntaaaaanattnanaagggnggactannanaaccttngnttagttccaaaanatttttnttacccccncaaaaagcccanacnttggangnnggaacttcccntttttcccctnntcccagccnttgaaaacnacnaanntggtttttggtggntngnctnttttggnnntttnanataaanggnggtttttaatatg

SEQ ID NO: 276 - DNA, 358 bp, Homo sapiens
  misc_feature (1)...(358): n = A,T,C or G
tggggagctcctgcttaagtccganctgngatatgttccgtttaaggctctgaagatggggagagaattctggatgatccaggtgggcccttaataatggtcccttattacagagagccagagggagatttgaaactgacaggagaagtcagtaagaccatgaatgcagagattcgagtaatacggctacgagccaaaagatgccagcagccacctgcagctggaagaggcataaatggattctcccctaaagctcccaggagtgtggccctgctgacaccctgatttcagccccatgatactgatgttggactggtcctcagaactgtgaaagaataaattcctattgttttaaacc

SEQ ID NO: 277 - DNA, 183 bp, Homo sapiens
  misc_feature (1)...(183): n = A,T,C or G
aagngattggaggtgagtcagcttcaaccgtgccatgaggacctcaccctaggaggtggcagagacaccggaggaatggaacccaagtcatggaataacctcacattgcagagccaccttgctaatcttggactgctcacctctggactatcactggagaaataaatacacttttaagttgtt

SEQ ID NO: 278 - DNA, 381 bp, Homo sapiens
  misc_feature (1)...(381): n = A,T,C or G
ggggagctcctgcttaagttacgaagctgnnattcattctntagaagggcatcanaggaagataaagaaggatcctcaatgtcagacatctgagcccaagctaagccatcataatccctgtgacgtgcacatatacatgccccactccaactaatcaatcgaccttgtgacattcctcccctggacaatgagtctcatgatctcccaaccctgcaccttgtgacccctcccctgcccacaagagataaccacctttaagtgtaattttccactacctacccaaatcctataaagctgccccacccctatctccctttgctgactctttgtggactcagcccacttgcacccaagtgaaataaacagccttgttgctctcac

SEQ ID NO: 279 - DNA, 459 bp, Homo sapiens
  misc_feature (1)...(459): n = A,T,C or G
gtcgaactgtgaccctgnnctcccttgctttantggaattctcttccagcttcttggaccctgtactggggtgaagagtatcttccaaaaattcacatctacccagaacatcanaatatgaactttttttgaaatacgtttttgcngatgtaatcanataaaaatgagatnataccanattagggtnggcccttatccaatgaatagtatccttacaaaaagacggaaacttggacatgcacattccgggggaacctccatgtgatggtgaacactaagactggagtgatgtgtctacaagccaagaaatgccaagatttccagcaggcaccagaagctagtagagaggcatggaacagattgtccctccgaacctccagaaggaaccaagcctgcagatgccttaatttcagacttctgatgttcagaactacaaaagaataaattcctgttgctttt

SEQ ID NO: 280 - DNA, 281 bp, Homo sapiens
  misc_feature (1)...(281): n = A,T,C or G
tggggagctcctgctttaagttagaactntgggacagnatgtcngtcnnacanttttatcccggntggaatgcagtggtgtgatcctcctgcctcagcctcctaagtagctgggactacagagacggggtttcaccatgttgaccaggctggtctagaactcctgacctcaagcaatccacccacctcggcctcccaaagtgctaggattacaggcgtgagccacctcgtctggccaataaacagaacttacaattgatctnaaaaaaaaaaaggccggcg

SEQ ID NO: 281 - DNA, 252 bp, Homo sapiens
gaagatgaggatactgacagagtaaaatcatggagaaaatggaagaactgaatgcagacatgagaagttaaatcacagaagaaaagttaagcaggaacttgagagagggatgaactgtgacaagttgtaagaaggaagaccaggactcaccaggaaaataataaattgtccttgatcgtacaaaagaatgtgttaatggaattttcctaataaatgtgagagaatgtcagcataaatattgattttaaaaac

SEQ ID NO: 282 - DNA, 380 bp, Homo sapiens
  misc_feature (1)...(380): n = A,T,C or G
atggagtcttgctctgttgcccaggctggagtgcagtggcacaatcttggctcactgcaagctccgcctcccaggttcatgtcattctcctgcctcagcctcccaagtagcggggactacaagcacccgccaccacgcccggctaatttttgtacttttagtagagacagggtttcactgcgttaaccagatggtctcgatctcctgaacttgtgattcgcccacctcagcctcccaaagtgctgggattacaggcgtgagccactgcatccggcccagtaatcttttaaaccacactcattgnctaattttgctagcaattcaatataaactttatgctttgaaaataaaattggattcattttgaagacttaaaaaag

SEQ ID NO: 283 - DNA, 120 bp, Homo sapiens
gtcatctttgatctatcagattttaaggcatcatctgacagcagatcttcaataagtatctgtggcatgaaggaaaagggaaaggaaaagggaaaggaaaaaggaaaggaagaaaggaag

SEQ ID NO: 284 - DNA, 317 bp, Homo sapiens
gttcatgtggaaccctgggttctcctacataccatttggagacgctggggaccagtattaaagaaaaattatccagacacttgtaaaaatgcacagtgatggacattgaggaagatattgtatatttgttcactcaacactcattccaacgctctcctagtttgcctttctatctactacaggctggaagactgactctagtggagcctgctgtctgaaactccgaagtctgaccaaagcagcaaccccctctccattatccctgttccccctcctctcacgacataaacaaaagtgtaagcatggaaatcataatt

SEQ ID NO: 285 - DNA, 300 bp, Homo sapiens
atgtaaagagccatgaaacagatgtgagagatgccctgacttagaagccccctcttcacaggtgccaacatctcttgaacaactcagcaggcatggtttcaaagacccccccacacaaaatgcccgattatgagtcaacaccttccaggaagcccaaagcattttccttatctggagatcctctgtcagtcaaattccactattatgaatacagcaaaacaatacagaagaaatgagaccattatgtaacagaaatagatgtcacagagatcacacaataaagctcacgcaatttactcc

SEQ ID NO: 286 - DNA, 436 bp, Homo sapiens
ctctgttgcccaggttggagtgcagtggtgcaatctcggctcactacaacttctgcctcccaggtccaagctattctcctgcctcagcttcctgagtagctgggattacacgcacacaccaccatgcttggccaatttttgtattttaaaagaggtggggttttatcacattggccaggctggtctcaaactcctgacctcaagtgatccacctgcctcgccctcccaaagtgctgggattacaggtgtgagccaccgggcctggccaagagttacttacatttttaaatgacacattatggcattttatgggagaaattcttctgctgtcggcaatattcgatttgaggatttgaccaggtctctggacatctccacacgtgtcaatgggctaaggtgctttaaataaacaaggttatctgcataagtccacaat

SEQ ID NO: 287 - DNA, 388 bp, Homo sapiens
attggcgtgcttaaagggctgaccatctgatgtacaggaaatggaaactactctctgaaaagcaagtgatctcccagccgcacccatttaggagaccaggattttattttgatccacaggagactaaatgagttagaggccactcctgtatcaacagagtttgttacttaaatgacagtagggcggttcgcagaaggaacaccaaatagtctgactatctaccaagaagagagtgtttgaacacatgtgcaacctcttgactgtggtgtgtggggcagcatttaataagaaagagctaaatctgcttgatgtgggaatatattcaacacatgttaagtgctaaaatattcaaagtaaataaatgtctatgtactccatattgttaaag

SEQ ID NO: 288 - DNA, 324 bp, Homo sapiens
cggctgaatcacttgagctcaggagttcaagaccggcctggccaacatggcgaaaacccatctctacaaaaaatacaaaaattagctgcacgtgatggtgcacacctatggtccccgctacttgggaggctgaagtggaaggattgcttgagcttgggaggcggaggttgcagtgagccaagatcatgccactgcacgccagcctgggtgacagaggcagaccctgtctctaaacaacaaaaaaccccactgaattgtatacgttaaaaggactttacatcacgtgaattacatctcaatgaaaaataaaatactgaatgaacg

SEQ ID NO: 289 - DNA, 565 bp, Homo sapiens
  misc_feature (1)...(565): n = A,T,C or G
gtggaaagagaatagcttgtgagagtgtatgagtggaatgaagtggtcagatgagagagcgcggcggagatggagagaagcggagaacttgatgcatattttggaggcaaaatcaacaagattggctgatggattaaaagcagaanattttgccatanagaaatctcttgcttttcaatctctccaatttgggaaccaaccaaccaaccagtctaccaaccagccaacgaaccaactactcaaccggtcaactgactcctcccggagacaaagattggagaattgcttgaatctggtacaaagactaaagcaaagtaatactgtatcatgcacagacctcaactctgtgaagacagtccctcatgctgtaggaagtcagccttgaatatctaggcttaggggaggctgagaaaggtcaccactggagaagtaagcggttggggcaggtcaggatccagggctctcaattcttatggagagattttgcttttttaaaacatcanacctgctggtgntgcactcagttttctttcttataaaaatcaactctttttgagatgtactg

SEQ ID NO: 290 - DNA, 343 bp, Homo sapiens
  misc_feature (1)...(343): n = A,T,C or G
canattgcngcncnnnggnaaaanaaacagccatgttgctcacacaaagcctgtttggtggtctnttcccacggacacgcgagacaatgaggagatacaaggtctcgctgttctacctaggctgttctagaactcctaatgtcaagctatcctcctgcctnggcctcccatgctgttgggattacagctataaattcatacaattatcagagtttggttttggtcaagtcataattgtgagtgaagaaccatggaaggagaacatttcttgctcatcaactactttcataaaatcaacaatttgcttaagtaaagtcttcaaaataaatactgattttaatga

SEQ ID NO: 291 - DNA, 403 bp, Homo sapiens
  misc_feature (1)...(403): n = A,T,C or G
ggttttgctctgtcacctgggctggagtgctttcgtgcagtctcagctcactgcagccttgtcctccccagctcaagcaattctcctgcctgagcttcccaaatggctgggactacagggcttatgtctgggatcctcacagagactagaagtgtctcccatccccatcgcagtccctggcacttcctggattgtcgagcggctccctgcctctgcccttttgtattcggagctacagccttgcctcccctgttcccaccaccctgaccacccctcaacaccatcccgctgtcagctccgccgccaactgaggcgacacctgttcatggaaaccctgtgagcctcttctgtatccatacacaataggtaatgntgntttacgtgtttcaaaacattaatggtg

SEQ ID NO: 292 - DNA, 185 bp, Homo sapiens
  misc_feature (1)...(185): n = A,T,C or G
cccagccccacgtaaacaagcccagctgtcctgctagagaggttctggggtgaggctgcgaggagaagagccttgatttgaagccttaagagtgaccctgagcnagaaccacccagttaagctgtgtctccattcctgagccacagaaactatgagatgataaatgtttattgctctaagttgct

SEQ ID NO: 293 - DNA, 231 bp, Homo sapiens
agacaaggtctcactctgacacccaggctggagtgcagtggtgtgttcatagctcactataacctcgacagtgagatcctgagctcgagtgatcgtctcccctcagcctcccaaagtgatggaattataggcgtgagctactgtacccggccactgttgctgttttgaaagggagccctcctctcccctaccacattctatattaagaaattccaaattaaatgaagagat

SEQ ID NO: 294 - DNA, 153 bp, Homo sapiens
  misc_feature (1)...(153): n = A,T,C or G
gtgaggacacagcaatcctccagaggatgcagcaacaagacaccatcttggaagcagngcagccctcaccagacaccaaatcggccagcccattgatcttagacttcccagcctccagaactatgaaaaataaatttcttttgtttataaatc

SEQ ID NO: 295 - DNA, 289 bp, Homo sapiens
ccacggaactgggattcctgaaaatcaaatacagaactcatcataccattggttgaattacaatgttctactttaattgggcacttacaaagtaattcttcaatcagtgtctctaatgtctcactgcttcccaacaaatctacgaagacagaacaaaagatgcaacttacagaaacacagaaaattaagactgtcagaggacatagtgcttgattcggaggtggttgggagagagattttcactgaatagcagaataatggaagattatgataaaaataattaatggtc

SEQ ID NO: 296 - DNA, 275 bp, Homo sapiens
  misc_feature (1)...(275): n = A,T,C or G
gcatgtgacaatgcaatgagaagntggcngnctgnnnntcacaagagggtcctnaccataacctgaccatgctggcaccttgattcccagcctctataactnnaagctgggcaactaccatntncagaagtgtaagaatcaaatttntgatgtgtataagccatgcagnctatgatacttnatgatagtanccaganctgactatnatacagggncntatacatattttatgcttcntagtnntcatctgtaaaataaaaagtttgaaaacaagg

SEQ ID NO: 297 - DNA, 292 bp, Homo sapiens
gtctactctgtcgcccgggctggaatacagtggcaggatcacagctcaccgcagccttgacttcctgggccctaagatcaggtgatcctcccacctcagcctcacaagtagctgggactacagacacccaccaccacaccttgactaatttttttatctttattttttgtaaccggtctcaaactcctggcctcaagccatcctcccacctccacctcccaaagcgctgagattacaggcatgagccactgcgcccaatctagaccctaataatgaataaaacattaaaatt

SEQ ID NO: 298 - DNA, 577 bp, Homo sapiens
  misc_feature (1)...(577): n = A,T,C or G
acggagtcttgctcttattgtccaggctggagtgcaatggcgtgatctcggctcaccacaccctctgcctcctgggttcaagcaattcttctgcctcagcctcccaagtagctgagattacaggcatgcaccaccacacttggctaattttgtatttttaggagagatgggtttctccatgctggtcaggctggtcttgaactcctgacctcaggtgatccacccacctcggcctcccagagtgctgggattacaggtgtgagccaccacgccaggccttttttttaattttagtaagaaagaggtctccctatattgcccaggttggcctcaaactcctgggcttaaanaagtcctcctgcctcaacctctcacaatgctgggatcgcaggtatgaacaaccacacccaacccnggtangggtattattatcatcatcaacaatggtattctttggttctcttaaccaaactgaatgcccgnacctcttttcacaatggcttttcctttctggantggcctttggctttgttngnattcatgtttcacatcantaaaagcccctcttcaggatgcc

SEQ ID NO: 299 - DNA, 148 bp, Homo sapiens
gtgaggacacagcaatcctccagaggatgcagcaacaagacaccatcttggaagcagagcagccctcaccagacaccaaatcggccagcccattgatcttagacttcccagcctccagaactatgaaaaataaatttcttttgtttac

SEQ ID NO: 300 - DNA, 338 bp, Homo sapiens
gaagggaggcagcccgagcagacttactgaaggatgagctgatctttgttcaaatcctggctttaccacttaatagctgcacacttcctgcagttcctcccacttatctgagtctcagatgctccccgttaagatgggtccaatagctaccactgcatttacctcgaaggagtaaatgaggattaactaagcgcctgatgtgaagaactgtgcctgcagcctttgaaggaagccaggctttcgaggatgtgtgaggcctggggaattcatttgtttcaaataaccatcaatgagattccagatttcctgcccagagttaaaatcggtgttgaaaaccc

SEQ ID NO: 301 - DNA, 334 bp, Homo sapiens
  misc_feature (1)...(334): n = A,T,C or G
tggggagctcctgcattaagtgagganctganattatntgtatgcacattncatccggntctcanatatcgnnacttgttcaccacagtanaggactcanaaatacccatggcnacncactggagatcctcactgnctcangggcnnagctggtttgaacacggtctttccattgnttnactgcccgccattnaccctcaaggtccattctgtgccaaggcattgcatgttctcaaggcaatgaccctggagaatgaatagccatgngtggcagtataagtgcttggaaggtgacttagcccatttgaacaataaaactgtcttttaaacaggt

SEQ ID NO: 302 - DNA, 448 bp, Homo sapiens
  misc_feature (1)...(448): n = A,T,C or G
ntcagagcccggcgctgcatcagactcacgtcaactaanaaactncncctgtttatttaaannaaatcnagccccacccanttgaagtcactgatgtaactcagcaacccacttggntcccaatcctggaaggatacanacatgttcatgangcttcnggcgcatatgtgacanaactttccatgaaaccaactggccatgantcnaaggactccttcacagagacaaatccatctccttcaaatacccanattctattggtgngggaaaggcaacgatttgaaaaactggagcattttacctaaagggattttaaaaaatcccaccattgctttatcacaacttgggggattattantggatttccctccctcttgctcccanaaggnggactttggagaaaaagagagtttgggagctaagaataaaccgcatttcttgcatatgt

SEQ ID NO: 303 - DNA, 216 bp, Homo sapiens
gagagacggggtttctccatgttgcctagcctggtctcgaacctctcacctcaagtgatccgcctgccttggcctctcaaagtgctgggattacaggcgtgagccaccgtgcctggccctagcaagtcacataatttatagagggtaactctgtcgattttaaacttcgcgtagtctgacccattcattcatccaataaacacgtattcagcacct

SEQ ID NO: 304 - DNA, 260 bp, Homo sapiens
  misc_feature (1)...(260): n = A,T,C or G
catgtgagaacacagtgagaaggtggccatctacaagccaagaagagagccttcaccagaaatggaattggctggcatcttaagtttggacttcccagccttcaaagctgtgagaaaataaatgttgtttaagcccttggngaaaaagacaaannaaactgcttttcaaaaaactnannaanaanttggacggngncgggggncncctntgtgnnctttcnacacnncgggnntttttttnaaanggggggggccccccc

SEQ ID NO: 305 - DNA, 520 bp, Homo sapiens
  misc_feature (1)...(520): n = A,T,C or G
gctcagctcatcatgaagaatgtccatgtgactttggttaataaaataatagatccagtggactgtagtctgtttaactgagacctcacacataatgtcatggttgacagttactggttgaaggaaatccatgttgggcttctgtggatgctggattctttccttctgagaagaaatataacacactgactttgaggtgatggtggagaaaaagtacaagcagaagacttttcncaacttctccataggctggagtgcagttgcatgaacatggctcacagcagcctcaacttcctgggctcaagcaatcctcctgcctcaccctccatagtaagctgggaccataggcaggtgtcaccacacccaggttctgtaactggagactgccaatgaaactgccaaaaggcagattaaccaggagaaaagacatacagacttcatctgatggtnacaggttaatttttacatgcatggaggccttcatagaaaaagaagtgaangccctaaagaagtgatttta

SEQ ID NO: 306 - DNA, 393 bp, Homo sapiens
  misc_feature (1)...(393): n = A,T,C or G
nnactgncgcactacagctcacgactgcngccagcatactgacaatgacgcagcccggacctgggctgtctctacccacaggaccctcttgtggcccctcctggacacacccatgttcctcccagatcacccctcgtggaccccccacaaccactgaactattctccacagctacacttttgccatttcaagaatgttatgtaaatggaatcatacagtaaccttttggaattggcttttttcactcagcataattctctggagagttcatccaggttgtcacaggtatcaatagttcatggtgcggacgtacaatttaacgtttcacccaccaaaagacattggggttctttccagtttttgactgcgacaaataaacgaatataaacattc

SEQ ID NO: 307 - DNA, 304 bp, Homo sapiens
gacttctctatcaggcagcacccaccagagagcagttctgaaactgagactaccagatcagaaacaaacaagcaaacaaaaaaagacccataggagctgggagtgcccatccaagtacatccacatcatccagtaaaagaaacagaaccttgaagtcaaacagactggttagcacacacctcctccgtttgctagttgtgtgactaagggcagtttcttaactactctgtgcctcctctgtaaatatcaatgtgctaataatcccacctcgctggatcatttcaaaataaaatgcataacattg

SEQ ID NO: 308 - DNA, 365 bp, Homo sapiens
  misc_feature (1)...(365): n = A,T,C or G
gcctatccagtaacagagtctactgcatcatattaactgataaacccaggatgacaagagaaacatgggactcactcttcatttgcattgactccagctaagagcttcagttttcatgctttgcttcaaaattattggtgagccctgtgctaatttccatctcatcctagaagtcagttattttataagcatgtaattgcttataaaaataagctgggaaggaagaacattttggaagagggaggcatatgcctgaaagaagaaggggatgggaatacagtcagttgctattttggcccanaaatatgtcaggcaaacatgtaggnattgnatttccttgattgncttaattattggagaaagac

SEQ ID NO: 309 - DNA, 298 bp, Homo sapiens
  misc_feature (1)...(298): n = A,T,C or G
tgggactcctgcttagtcgaactgagcccagtgccgtggctcatgcctgtatccagccttttggangccgggcaggcngatcacganatcangaaatcaagancatnctggccaacgcaatgaaaccccgtctttaccaaaaatacaaaaaaattaaccaggcgtggtggcgggcgcctatagtcccacctactggggaagcttaggcaggaaaattgcttgaacctgggaggcagaaattacactgcctgagattgcatnactgcctncacctgggcaacaagacaagactccgtct

SEQ ID NO: 310 - DNA, 459 bp, Homo sapiens
  misc_feature (1)...(459): n = A,T,C or G
gtcaccaggtatgcccctgggctcctgccgcagctgatcgggtgctaggtgctgaggatacaccgtctgggagaaagcaattggaagaaatgcaaagctcttcaaaggagacctataaagtcatctttgttttgttcattcttctcatgtttctgcattctgggcattctcctaaattggggagaaaccaaaatgcccagaagtcaaattctgcaactgtcatcaagcaaaatgtcaaatgagagaaccaaagtatgctggattctatattgttaggaagggatggntaatttgattgactcttgggagctatttctctagcattaagtaattctagggaacccttctgtgatcatctctgagtaaataaagaaangaaattgcaattcaaaaaaaaagccagcgaggccanttcagcttggacttaaccaggctgaacttgctcaaaagggggggggg

SEQ ID NO: 311 - DNA, 585 bp, Homo sapiens
  misc_feature (1)...(585): n = A,T,C or G
attccggctgtgggctccttggaggaagagcagaggtgaagcgcttctcatcccaccacatcaggggtcctgcctcggcccggctcactgctgatgttgacctcggctacctggcagagtgtgctggccaggtttctccagcatgaagtcactctcgtttcccttggcgatgctccttccatcaaaaccagagtgtcccagctctagattccccacccaatctcctgtggctgtctcaacacctccgtcgtgaatccgtgcatcccttcagacgactgccttccgatgcggccctgacctgccccccctcccatcactgaataggactccttttctcctggatttcctgtaggaagtttcaaaatgctctccaggntttctgngggtggattatcctctggatctttctaaagtgaagtcctggtttcaccacaactcccccgacacagttgaacaactgtaccgnggggaggcttggncctcttgccccatttgggggatgncattgnaatcatgccaagggccctgacgtcanaacttcacctgacatgtgctcatgccgggttacaaaccttccaagacaag

SEQ ID NO: 312 - DNA, 117 bp, Homo sapiens
catttgtcacattgcaaaagacctcaacgcacagctgactccagggtggaaagaccaacgacacgccgaaattcatcctgcactccagcctgggcaacaagagcgaaactctgtctc

SEQ ID NO: 313 - DNA, 132 bp, Homo sapiens
  misc_feature (1)...(132): n = A,T,C or G
agtttggctgtgttgctcangctggagtgctgtcgtgctgtcatagcccactgaaaccttgatttcctagccttaagtgatccccccaccttggccttccaaagcattgggattacaagcatgagccactgc

SEQ ID NO: 314 - DNA, 263 bp, Homo sapiens
atgaaccatttctggtgcagaaaaggctccgatgctgcttttatgaaggaacataatgctagcttggagatcacacaattgcagacctctttcctccggttgggaaatatactgaagaacagaagacacctgctctcccttcacctcccaccatgattgtaagcttcctgaggcctcactggaagaagctaagaagatgttggcgccatgcttgtatagtctgaagaaccatgagacaattaaacctcttttctttataaatt

SEQ ID NO: 315 - DNA, 362 bp, Homo sapiens
gtctgacctgtcagtggctcagctgagattcaaacccggagccagcacgctgacccagttcacctgtgcccgacatcatgcacgacagccccaaatgttgagcaggccaggccggcacagaaaccactgcgcacagatggtctctcctccctgtcaccgtgacctccaacccctcccctcagcgctccgccccagagggttgctgcatcggaacttgcgggcacaggacctggacagccgcacttagcaagctcttcctccacgcccatggtgactgtaaggtggggagtctgggaccatgggggcacccacctccagcaaacacgccacaagcaccttggaaaattcaattctgcctccct

SEQ ID NO: 316 - DNA, 141 bp, Homo sapiens
gttttttggggattgaagaagatgaagacattgcaactaataatgacactgctactacggttgtaggaaggaacgcactaaggaataactagaaacggatgaagaagatgatacagagccacgctgcaggactattttgat

SEQ ID NO: 317 - DNA, 508 bp, Homo sapiens
  misc_feature (1)...(508): n = A,T,C or G
atggagtctactctgtcacccaggctgacctcgactcacagcaacctctgcctccagggttcaagtgattcttctgcctcagcctcccgagtagctgggactacaggtgtcaggcctctgagcccaagctaagccatcatatcccctgtgatctgcacctacacatccagatggctgaagtaagtgaagatccacaaaagaagtgaaaatagccttaactgatggcattccaccattgtgatttgtttctgcctcaccctaactgatcaatgtactttgaaatctcccgcacccttaagaaggttctttgtaattctccccacccttgagaatgtactttgtgagatcaccctctgcccgcaaaacattgctcttaactccaccgcctatccaaaactataagagctaatgataatccaccaccctttgctgactctttttcggactcanccgcctgnccccgggtaaaataaaaagccntgtgtcacgccaaaaaaaaaaagggccg

SEQ ID NO: 318 - DNA, 404 bp, Homo sapiens
  misc_feature (1)...(404): n = A,T,C or G
gtggggtctttcattggcggcagagtctggggctggcatggctgctgggctgcttggctctgaggacccaccgtggagttggaacctgacttgtcgggcgctgaggacctgccaagtgaggaacattcgagttctgcagctgctgctaaaaccatggtgcatctccagggcccgtctatcaggtgccatgcgtgccatacggtgcgccacgtgaagtgcaccgtaaacatgatttaattcaactttcaaagccacccggatcgagaaagtgcctatgtcaccatcttgattattattgncaccattttgagatgagattattgaaactcanagaanggatgnaagttggttcaaaagtcacccanacagaacctggtgatttcaaaccaaagttctcctggctg

SEQ ID NO: 319 - DNA, 237 bp, Homo sapiens
gaattgtcctatgccaagagagctgccttgccagaagtgacactcacttccaggagtcagcctgcatccagtggctgtcaaagggggagcaattctgcaggatcatccgggcccctgagctctctgtagaacagctgaagcgaccgcatggcctcaacttctccttccacccattcctgtttcctgccctccctgctcaggggtaactccaagagcaccctccagtaaacctcttgc

SEQ ID NO: 320 - DNA, 218 bp, Homo sapiens
caacctatccaggataccatgtttcatttagttgtcatgtctcattgttaccagaaagtggtcccaactcagactccaagagagagtttttggacctcaagcgagaaagatttcagagcaagtccacagagtaaagtgaaggttctaaaacactatattttgggagtgcagcaagggttggcggaatggaactgaaataacaagtgggtttgttatcc

SEQ ID NO: 321 - DNA, 226 bp, Homo sapiens
  misc_feature (1)...(226): n = A,T,C or G
cttcttaaatgctgcattgaaaggatgaaacagaacggatgtgaacaagagttccctgagaaaggacagctcttagagagataggataattactggactcaagaagataccaaatcatggtgtgcatttctgcgttgtgtttggaagaggaactaggattgttatgaaaaggaaggatgtgttcaacttanaagaattaaacctcaaccatctgtctcttcccaac

SEQ ID NO: 322 - DNA, 177 bp, Homo sapiens
ctgaaagaaatataagaaatacaacctaatactgtaatgaagtgttcctgaacaaaaatacagataagctgttttaaaatattatctttatttgtatgctcatatcaggataactccaactaaggcaatttgtctaagtagctcatttatttaaaaagaaaagtaaaaatagcaatg

SEQ ID NO: 323 - DNA, 502 bp, Homo sapiens
  misc_feature (1)...(502): n = A,T,C or G
gccgcacttggtgagagtcttcacggaccacagtgttgcacgaggtgattgtgtttgcagaggtttttttgtccttgaagagcacttagggctggagagcaggacacatgctgacgagcagaagctgacaggcttgctgccatgtgggaaagtccttggacgagttgtctgcttgcggagaggtgtctgcggctcaggtatgaacaaaagaaacatgcttcacttctgggcagaatccccaagagctaccatgaggtcctccgcttctcttttctccctaccacaagactgacatgactccaagagggactgctcctttagcctgggtccctagaatgaagattgatatgcagaaaaacttcagccagcctgcaatggacttgtggggttagcaataagcttttgttggtataagccactgagagccaggggctgtatgttactgnggcagaacttaactgaagctgactaacactggtactaacagaatcattttcaaatg

SEQ ID NO: 324 - DNA, 229 bp, Homo sapiens
acaaatcataacgaacagagtccagtgagtccctctgtcgcaacaagttcaggatcactcaagcagtggagacggagtttcaccatgttggcaaggctagtctcaaactcctgacttcaagtgattcgcccacctcggcctctcaaagtgctgggattacaggcatgagccaccgtgtccggccccactacattcttaaagaagcaataaattgaccttgtttaaatac

SEQ ID NO: 325 - DNA, 297 bp, Homo sapiens
gtcctattcacggttactgggagctggagcttcaacagatcttttgggaagacacaattcaactcacgacagggaggaagaattgcgagtacttgctactgctgtgatgccgtggagtgagcagaaagatcaatgccagatctaaaaggacttgaggctgtgagttccatctcttgttctctctcaccctcttgccttccactatggggtgatacaagaatgccctcgacagatgctagcactttgatactggatttcccaccctccaaagctgaaaaataaatttctttcctttat

SEQ ID NO: 326 - DNA, 282 bp, Homo sapiens
gagcagaaatgtgaacagctggaggccggaaaagaaaggacacaagcggagaagaaacaccagaggaaaaataatcccttagagggtaaagaacaaataattgaataagggattaaaaaacacacaaggagagatccctggtaattacccttgacagccagtgtgaaaagggcccgggatgggggctttgtccctcccctctccgctcacacctctcagccgcagtaggttctttcctgttgctcctgtcttgatttagaataagctccttttctctaaagc

SEQ ID NO: 327 - DNA, 269 bp, Homo sapiens
attcccccctgctgacagtgtgtgccctggcgatggagcagtgtccttgttgcagatttgaaccactttcacctcgtaaacagcagctggtgagaggaatggacttgcacattcattcgttttacaaatgaagaaactgaagcacagagaaggaaggaatgatttgtgcaggaggtggtatttgagatactcatcattttctctcattacccacatttgtttctactcctgtagtagtttggttaaaggcaatagactccttgttcctt

SEQ ID NO: 328 - DNA, 174 bp, Homo sapiens
  misc_feature (1)...(174): n = A,T,C or G
ccgcagcgcctcccgctcctccgacgtggactcgtggctgtaatagcgcagcaggaagggccagacctccccgcggattgacacatcaataccgccaaagaaaatggcctggaggaagcggcaaaagttggtgaggggatnaaatggggcagctcaaagaacccccaaatcccc

SEQ ID NO: 329 - DNA, 405 bp, Homo sapiens
agaaaatacctggtaagccctaatggaaaccatctgttagaaaaagaaggagacagaatcgtggagctctgttgacttccctcgtcttaccagcaaagagaagaggtgtagtaattcttaaaaaggaagaaagaagagagatcaaagtgggagaaggaaaaataaaaagaaaaaggactaagcactttcttctttcctctgagagactgcggtggctctcccacctttccggagactcgtcagcacctgcctggtggacagcaccacatctttaaattctaaggttctaacccctttattcccaaattctggagttcactaacaaagtggttttcattctttaaaaaatgaaatgaaaccaaagagggacacacagagggcttccaaaataaaatgctagatctt

SEQ ID NO: 330 - DNA, 434 bp, Homo sapiens
  misc_feature (1)...(434): n = A,T,C or G
gacagaagctttttagtttgacatcactaatcatcaaggaaacacaaatcaaaatcacaatgagatatcaccttatacatgtgaggatggctattatcaaaaatacaaaacacaagtgttggcgaggatgtagagaaattggaacccgctgttggtgggaacgcaaaatggtacagccactatagaaaacaacttccaccccaagaagttgtgaatcacacagtatttctgaaaaggcatccttgccctatgcaaggctgccaatagccaaaaggaggcatctgagggaaggaaaaaagaactgcaccatgcatgcatgaagttggcaatttgcaaaagaaatctgaaacaacattgcaggcagaaaaagcaggaaagaggagatggtnagagacataaatggggaattgggggcaacaggaaattctggcccc

SEQ ID NO: 331 - DNA, 167 bp, Homo sapiens
ggaccatacaacataatctttatagtctccagcaacaggtatgccttcccctctacactgtgcttcttgggggctaaggaagaaactgagactgcatttcatccttcaggagtgagaagtttttgctccagtcataaatacttgctgaataaatgaatcttctattt

SEQ ID NO: 332 - DNA, 254 bp, Homo sapiens
actgagatatggttgaacatatacttaggacacgtaataactatggaacttcatcacaaacacagcactgaggacatgttctgaatacagacaatatggaggcctcaggctcagaggatggcagagtcttcagatggatggagggagctgcagtcactgaaccactgcagggagagaagtactcacagaccaggaacgctcaacttggactgttatgtgacagagtaataataaacttctattttggtttgagt

SEQ ID NO: 333 - DNA, 422 bp, Homo sapiens
  misc_feature (1)...(422): n = A,T,C or G
gatcctgtgcactttattcttccctaccagcctcagaagccacgtgctgaagacagtgaagttctgtctgggaagaagcatcgatccctaaatggctgcatggagcagagcagagatgtctgctcactaagttggttcgaagctgaggaggaaaaaaattaggtgctaggatgctggagagatcctcagaaacccctctacatgaatcatttaagtagatgaagagctagattgcaataatcattgggaggagaagaagaataaaacatgagattccattcacatcccagaattaaaggtaaaatgggtaaaaagtgacattttcaaacctggaatcacactggaacggtatttgcatcttggtaggtaacaataaaaatttaactntnaaaatanggcccngggggggggggtcatgcccg

SEQ ID NO: 334 - DNA, 327 bp, Homo sapiens
  misc_feature (1)...(327): n = A,T,C or G
ttgaagcccagtatttnanatccagctggaatcacaggggtttcttgtttggcccctccctgaaaccctggaagaatctggagtcagcagaagtgtgcatgttgcaaaaatcacagaatcatgtaaggaatgaaaggaaagcccccttcttcaaccctgactccaacaatcccactgctcaaaggaacccagataatacgtaggaaatacatacctacgtgtttcttacatatttagaaatatgtcaacataagtcattataaacataagtcattataattaagtcatttgtacttgagaagtcctaatgtacatggttacaatgca

SEQ ID NO: 335 - DNA, 460 bp, Homo sapiens
  misc_feature (1)...(460): n = A,T,C or G
ggattttaccggttcggccatatcagggacacttgaaaatttgcctacaaatatttgcctgctttccagtgcagcccttggaattaaaaaggaaaattcctgccctcagataaagatagggtcttgctgtgttgcccaggctggtcttggactcctggcatcaagcaattctcccaccttggcctcccagagtgctggggttacaggcatgagccactgtgcctggtcaactgtaacatttgattgcttggggctgcctgaagcatttggaggatgagaggagagcatttattttcttttggagagaaatctcaacagtatgggcatagctggctccttttattcctgcttttcatcgtctttggctaaactgccatggagacctggccccttctaccttattttagacactttaaaaaacacgggcncnctttggntananattttaaaaaacccccac

SEQ ID NO: 336 - DNA, 305 bp, Homo sapiens
  misc_feature (1)...(305): n = A,T,C or G
gagttctgaaaccacctcatacttggaatagaagccatgtgaaaacaaagcccctgcatcactcctatctgcctggaatgctgttgtgtganggtgtaatgtttgaagctgtggctgccatcttgtgacaaaggggcactccgtgttgtcaggatgaggacggcagaggaagatgctggggaaagcctggatctgcggacatctctgaaccactacgtcctgggaccagctatctgggcttcctgttttgtgagataatttcacgtatttatgataaaattattaaaatttgggtatcctgttat

SEQ ID NO: 337 - DNA, 174 bp, Homo sapiens
gctagtcaagtgaagcagtgggagtggaaaaggagcaaagaaatctgtaactggttgtgattccatgaactttttgaaatccccttgtattggcttccttccctcttctgtcttacttctctactccctacaagtgttttctgggatcacctccaaataaactacttgcaatct

SEQ ID NO: 338 - DNA, 98 bp, Homo sapiens
  misc_feature (1)...(98): n = A,T,C or G
tacgtccaaactgagggatgntaccggttcggccatatcagggncacttgnaaatttgcctacaaanatntgcctgctttccagngcagcccttggaa

SEQ ID NO: 339 - DNA, 291 bp, Homo sapiens
aaacagaactccagatttaaaaataaaggactgtatttcccagcatcccttgcagctaggtgtgggcatgcaactaagttcaggctaatttcttcctgaaagcatacaaagaacctacaactgaggcctcctgggaatataccaaggcaccatccaccccggggcctttgtacttgctgttccctttgcctggaagactctttctccagatatctgcagggccccaccctcaattcattcctgtattagtctgttctcacactgctaataaagatataccagagactgggt

SEQ ID NO: 340 - DNA, 271 bp, Homo sapiens
  misc_feature (1)...(271): n = A,T,C or G
attctcatcactgaatctccactgaaaaaaacagggtttggcacattgttaatttactgaaaagntgangccaggcgtggngnctcacacctgnnattccancactttgagaggccangatgggaggactgcttgaggccagaagtttgagagcagcctggtcaacatagncagacctcatctctaaaaataaaaataaagtanataaaacataaaaaaagaagaaacnncnaanaaaaaangggcctcngnggccntttaacttgggatt

SEQ ID NO: 341 - DNA, 285 bp, Homo sapiens
  misc_feature (1)...(285): n = A,T,C or G
tggggagatgtctgcgtnctnctncttgaggagaanccgggataaatggacttgangccacgaggagccagtgagtggtgcctggaacaccgtatgatgcccagaggagcccagcagtcatgctctgacagcagcatatggtgcgcactggaagaaggggaaaataaggtcaggaaggcagactgggagcttggattcgaggctgaagaactgccatcaaatgtttttgaaaggtgtgaaataatcaaaactgtactccatgatgattaaagctggcatagtgtg

SEQ ID NO: 342 - DNA, 400 bp, Homo sapiens
  misc_feature (1)...(400): n = A,T,C or G
atggcgtttcgctcttattgcccaggctggagtacaatggcacgatcttggctcaccacaacctctgcttcctgggttcgagtgattctcctgcctcagcctcccaagtagctgggattacaggcatgtgccaccaagcccagctaatttttgtatttttagtagagatggggtttctccatgttgttcaggctggtctccaactctcgacctcaggtgatctgcctgcctcggcttcccaaagtgctgggattacagatgtgagccactgcacctggccaaaagtgaagtcttaattcctaattactttgtctcctcttgttattaacttcttttcacttcttgaatttactgnactaactgcaccaaaagaaaaatttcttgattatataattcatgc

SEQ ID NO: 343 - DNA, 459 bp, Homo sapiens
  misc_feature (1)...(459): n = A,T,C or G
atccattatttgggcaggattctgtanggaaaactcatcaccacttnatatancatcagccatgcggctcanctganggctgntggatccacttntaagatgactcactgctggctggctgttaatgctgggntgaggccctggggccttggttngtctccacattgncctctccattangcctggacttcctcacanaatggtggacgagnctctaagggtaaacatcgcaagagagaaaaccanacaagagagcaaaacttgccttttgtgacctagcctcagaaatcacatagtgtctattaattgaagcaagtcccaaagtcccacctgggttcaaggggaggagatactgactacactgtccttgatgggagggtggtaaagattctggaagaaaaatgggaccanaaatgntgntgcaccnttttggggaaagggaatntaacccaaccgggt

SEQ ID NO: 344 - DNA, 423 bp, Homo sapiens
  misc_feature (1)...(423): n = A,T,C or G
attcattctcatagaagggcatcagaggaagataaagaaggatcctcaatgtcagacatctgagcccaagctaagccatcataatccctgtgacgtgcacatatacatgccccactccaactaatcaatcgaccttgtgacattcctcccctggacaatgaatctcatgatctcccaaccctgcaccttgtgacccctcccctgcccacaagagataaccacctttaagtgtaattttccactacctacccaaatcctataaagctgccccacccctatctccctttgctgactctttgtggactcagcccacttgcacccaagtgaaataaacaagccttgttgctcccaaaaaaaaaaaggccagngnggccaattnagcttggacttaaccaggctgaacttgntnaaaagggggggact

SEQ ID NO: 345 - DNA, 238 bp, Homo sapiens
tttcagagaggaggggagctgtgcagagatgtgctggaggagtgcctattggtgaccaaagacatgggatgctgaagcgatacagaatgccacctggaagttcgttgaaaccattgccgactaggtgtggtggcttcgtgcctgtaatcccagtactttgggaggctgaagcaggaggatcactggagaccaggagttcaagaccagcccgggcaacatagtaagaccctgtctctac

SEQ ID NO: 346 - DNA, 151 bp, Homo sapiens
aaaaaggtaatatttaagcctgaagtttaaactttctttgagatccactctgaagatttattaatttcttggggtttgtgctgcattctgcccctggctcccaccatgtatccatgaggcatgcatgttaacaaacttctgtttgattttc

SEQ ID NO: 347 - DNA, 423 bp, Homo sapiens
  misc_feature (1)...(423): n = A,T,C or G
gtggccattagggtggtccagaaggctggggaagcacagacaagggtaactgcaaaccgacagcacaatgggatacctcagnatcccgccaggatggctgtaactcaaacgacagcaacaccaatgcagtagacatgaggtttcatcacgttggccaggctggtctcgaactcctgacctcaagtcatctgcctgcctcggcctcccaaagtgctggaattacaggcgtgagccaccgcacccggcctgtttctaccattctggaaaacagtttggcactatactaaatgcctcagcagtttcacttttggaaccttctttgccctcacccctgggaaataacatttgccaaaactcattgaactgtactcttaaaatgnggacattttattatatgtnaactataattcaataaaattggtt

SEQ ID NO: 348 - DNA, 456 bp, Homo sapiens
  misc_feature (1)...(456): n = A,T,C or G
gattatggattatggatctctggaataaaaacatttagtgtcacagcaaaagaagttttgagtttatatacaaattaagtaaaagactaattttggttttgaaaaactcgttctctaaacttttacaggaagtttaaataaattacatcatgaacaaaactgcagtatgccagttcctatcctcatgacctcacgattctgcctgagctccacatcaatgaaaggaaaatcggataatgaagcacttagtctaatatctcaatagcaaccaccaantaggattactttttagaaaagaaaaaaaaacctaaccttatatgtaaatgtatctagtgngcaaatgacataatgcttatatgnatggaaatctatctagngggccaatgacttaatggccngggnggggaaacngngggcgagaagcccccaattccnccctccnggttttggaaaaac

SEQ ID NO: 349 - DNA, 249 bp, Homo sapiens
gataaagtttgatccagcatattctaaaatgctacaagactgccagcaagtttcaaagacacatcagagagaactcaacggcctgacctggagaccaggaggatgacattctcattaggcaagagatgctggaccttctgcagtaatgagaaatgaaagtcaccactctgctctaaaagcaggggctatttacccctgacctgacacacttctcaaagctctcacaataaaggcacccagcatccactt

SEQ ID NO: 350 - DNA, 205 bp, Homo sapiens
aatttgagaatctgatgattgcagctggaaagactgcagagagcacctgggtcaaccttttcattttgcataaagggaaataggcccagagaaagaaaagggactgtcccaagatcgcacagcaaccattttgaccttcaacaagtactccctgactccaagcaataagggtgaaaaaataaggaataaattgtataaagcacgt

SEQ ID NO: 351 - DNA, 458 bp, Homo sapiens
  misc_feature (1)...(458): n = A,T,C or G
agtatggtggaaangatgnnacgcccactccangcctaacctntaggaggactggcngtttntgctatggcctctggnanccatganctgccatgaaaaangncaaactactctgctggagacacccacctggagaagccntggnattccatgganaggcagacggacccagctgagctcagtgttccagccatccccacgaaagcaccaggaacctgagtgaaaccatctcgatcctccagcatagcacaatcaccngctgaagatnactgagtgactctagncggnagctccatggatcactgaaggatcacccntntgaaccctgcncaaatttctgactcacaaaactgtngancatacaatggttggtggttagggggcagtttggtatnctnttncaattaatttgccggaagagnccccaannaaaaaaataaggggggcccggcaagggc

SEQ ID NO: 352 - DNA, 285 bp, Homo sapiens
tgcttgtacggctgctatgtccattcctccatcatccccaccttccaccggaggtgctactggctccttcagggcctgacagggtggtgaaccccacggaaacatcagggcagcctgggcaagacaaaggcagcttcactccacaactgtccagaatcaaggatccgggccgggcgtggtggctcacgcctgtaatcccagcactttggaaggccgaggcaggcagatcacgagatcgggacaccgagactatcctggctaacacggtgaaaccccgtctctact

SEQ ID NO: 353 - DNA, 448 bp, Homo sapiens
  misc_feature (1)...(448): n = A,T,C or G
gtggaaatgcatttccaaaaccaccagctggctagaactttactggacctaaacatgaaagtgcagcaattgaaaaaggagtatgaactggaaattacatcagactcccaaagcccaaaagatgatgctgcgaatccggaataaagaaatgcacacgcaagggctgggcgcggtggctcacgcctgtaatcccagcactttgggaggccgaggcgggcggatcaagacgtcaggagattgagaccatcctggctaacactgtggaaaccctgcctctactaaaaaatacaaaaaattaagccagacgtggtggcaggcacctgtagtccctgctactcagggagtcttgagggcagggagaaatggcgtggaaccccngggagggcnggagcttgcagtgagcccgaaatcgtggccactggtactccaagccttggggccaacaaga

SEQ ID NO: 354 - DNA, 360 bp, Homo sapiens
  misc_feature (1)...(360): n = A,T,C or G
ctacaacagggtgcctggcncnaggagatactcantaaaactctcatctgctgtgtcattaaggggaacacttaatggctcacgcctgtaatcccagcactttgggaggccgaggcgganggatcacctgagcccaggagttggagaccancctgggcaacanattgagaccctgtctcaacangagaagaagaagaagaaaaaggccaggcgccgtggctaatgtctgtaatcccagcactttgggaggccaagaagggagaactgcttgaggccaggagttcgagaccagcctggtcaacatagcgagacaccccccccatctcaaaaataaataaatcaaaataaaaaataaagagg

SEQ ID NO: 355 - DNA, 387 bp, Homo sapiens
  misc_feature (1)...(387): n = A,T,C or G
ttcttcgtngactctggaatggagctggaagctgtcatcctcagcacactaacgcaggaacagaaaaccaagcactgcatgttcccacttataagtgagagctgaacgagcagaacacatggacatatgaaggggaacaacacactctggggcctgtgaggtgcagggagagcatcaagaagaacagctaatgggtgctgggcttaatacctgggtgatgggttgatctgtgcggcaaaccaccatggcacacatttacctatgtaacaaaccttgacatcctgcacatgtaccccggaacttaaaaataaaagttgacaaaaagaaaacataaaaaaagggccaggggggccaatncntttgnacttaacctggctgaacttgttc

SEQ ID NO: 356 - DNA, 418 bp, Homo sapiens
  misc_feature (1)...(418): n = A,T,C or G
gacgggnactctctgngatgccatnccagnnntnacntgctacnggctggctacctnatctgtggagctccagagaccangaangataacnctcattgncatagctacttgtcagcgcataagaaagtgancacacaggtggtaccaangaccttccttttctggttccaagataatggcnggcaccnaaggnctattcctctaccctactggnttatcactgggctgaagaancccaagtagtgaattacccactaggaccctggaagaggaagtacaacggttatcctcagttttccctggaatnnggaatgagctcctgggttactgaaagtctactttggtgccttgaatttaacccaatcccatatgtgataattattttagcatatttgataataaaagaatttaagaaggg

SEQ ID NO: 357 - DNA, 363 bp, Homo sapiens
  misc_feature (1)...(363): n = A,T,C or G
gtcaagctggtctctggtgtccatggggacacttcaggagaaaccgattaacattgagatgtgtggaaacaggatcaataattttcagtaactgaggaagattaccagaagccaaggcggcctttaacagagactgtgcagctctgagcccaggactgttaagcacttggcaggcaatggagaaagtctaattgtggctgacgatgagtcattttacactattgtcacacctcctttatccacattccattttaggaacagtataactttcccagccagaaattgtctaatttaaaccctgactcttacctgtgtgaatcaaaatgactcanaaagtgcaaataaaataaccctgaggagtcc

SEQ ID NO: 358 - DNA, 332 bp, Homo sapiens
gttccaggagttgcagaaatgccaccaggatctgcagaacacattgcaagacaaggagagctgggaggactcagaccctgacctcatccaaaagtgaaaaaccaatcctgccaaagtgaatgtattttctctccccaaaggcagacttgagacccccagcttcagggtggcttctgcctgacttccagagctccagccagtgccttttgtctgaaacctccatgtccaggacccttgggcggagaagaatctgctggacactgcttggggctggaccctgagagcgctcacatttgacaccccagaaagcaaataaaacagttgaaatatgt

SEQ ID NO: 359 - DNA, 394 bp, Homo sapiens
tcacagcctgggctcatcacgaaaggcagccagcacttcaacggactcactgcctctacctttctccttgcttggatgaagaatctgaatctagaagcccaccaaattcatctaacagtagtgcaagcagatattgctttggaaaatatctcagcagagaacactcctgggatgtatttcatcagtctgatacttccaactctgccagggaacaagctcaccaaaggcttctcatcaaacagctctgccctaaacaccctgggggattccccaacagtgtcttgcgggcctaatgacactcatgttccttctcatgcttacctttctttgcctgacgtgagtgcaaaaacctatcttaagcaagataattgtaaaaataccaaaattaaatgat

SEQ ID NO: 360 - DNA, 373 bp, Homo sapiens
  misc_feature (1)...(373): n = A,T,C or G
ctgattcctccttcctccatactcccaaggcacctgaggtctggctcttcaggctgtgtgacgacagggactttaaagaggcaatgaaggtaaaatgaggtcatcaggatggactccgatataaccggtgtccttacaagaagagaagacaggacacgcacacaaagcaagggtcagccatgtgaggacagtgagaaggcggccgtcgacacgccaaggagagaggcctgggaagaaaccaaccttacaccttgacatcagacttctggtctccaaaactgtaggaaaataaatttctcttgtttaagtcaaaaaaaaaggccagcgaggccaattcagcttggacttanccangctgaacttgctcaaaagg

SEQ ID NO: 361 - DNA, 431 bp, Homo sapiens
  misc_feature (1)...(431): n = A,T,C or G
gaggggcacacctttcaggcctagccctcggcctggatgaaggtgtggctgagcatccctgttcctggaacttggcatcagcatcactgacatcggaagcacacggaccccctcccacttcgacaagcatcaaacccatctcttctccttgctctggccaggtcagactggagccaactgtgctgcagctcctgtggaagccttggcagggaggtgagggggagcaccagttacaagcaaaggctccgagtgcaaagagccttcgcttatgattcaggaatctctgggcaagttacctaaggtatctgagccagcagttcgtcatctgtggaatggggagaatggcaacacttctcataagggttgaagtaagggaataaaatgatataatgngnattaaacccttaaaaaaagggctggctggcatataa

SEQ ID NO: 362 - DNA, 253 bp, Homo sapiens
gtatttttcagaccctgcattctgttggatctgctgatgccacccagactgataaactggttcatctgaccttgtggccccccgacccaggaactgaactcagcacaagaagacaggcttcaactccctgtgatttcatccacgacctaaccaatcagtactctccactccctagccccactgctccccaaattatcctttaaattttgggggaggctgctttgaataatgataaactcctgtccttctgctt

SEQ ID NO: 363 - DNA, 403 bp, Homo sapiens
  misc_feature (1)...(403): n = A,T,C or G
atcctgcctcccacagtcaccctgctcccaagtgcaacctctgtctgaccctgcatggtgtgcggtgccctcctgcctcagcctcccgggtagctgggactgcgggcctgcgccaccacacccggctaattttttctatttttttttttttttttgggggnaaanggggtttaacnatttnggcnaggnnggtntnnaactccnnatntgggggccnacccgcntgggcctccnagggggntnaaattgnaggggggggcnaaccnccctggccccaaanaaatttttttttggttaaaantttttgggnnnggattgccccctaaaatgttccccaattgggncttattnttttaaaggaaagncccaaagggnactttatttttagnntaggaaaaaaaac

SEQ ID NO: 364 - DNA, 132 bp, Homo sapiens
gcatccaggtatacacacaagctgcatcgtgtcactgcaagcggctcccagagttgttcctgttcatccaggaagaaagaaaatcccgccaaagattgagagagatcaataaatgtatttccaaagaacctg

SEQ ID NO: 365 - DNA, 435 bp, Homo sapiens
  misc_feature (1)...(435): n = A,T,C or G
tagtaaaanggggcctgcttccccgtcaccttccgccacaatcgttaagtttcctggggcctccccagaagctgctatgcttcctatacagtctgcagaactgatgacatggcatgaaggccctcaacagatggcagcacctttaataatgaacttcccagcatccagaactatgagaaatcaatttattttcttataaactacacaatctgtggtattgttatggcagcacaaaatcagactaggacagaagaattctccaacgaacccattcaggactggtgctttctgttttgaaaagttcatatttctttatttttgnataaataataccattttcaagttataatgntcattataatgncatatccactagaaaatttaaaaacactgccatactgagggttttaaagaaaacaacatggactagcattt

SEQ ID NO: 366 - DNA, 330 bp, Homo sapiens
  misc_feature (1)...(330): n = A,T,C or G
gaagaatatcnaggagcccttaaaacacttngatnaacnatacnaggttatgcganagnaccctcattttttanncaagattgcaaagaaaattcatttcagttctacatttggtgccaagcgttgttagttgcagataaataagatagaatccagctcttaagaaattcaatctagtggaaaaaaacataaatatttgcagttaattttttaggcgtcaggcactgtgctaagtactctcattggtgaccttgatttttaccctcttaatctccatgtgctcccccttcccaaatacactccaagtaaatataaaatcttagtgaaaac

SEQ ID NO: 367 - DNA, 351 bp, Homo sapiens
gcttaatttttcctgatcatgagagaagaacacagatgtagctgaactaaggagcaaaaacccggcatcaatacctgctacagcacagatgcagcatgaaaaattatgctaagtgaaataagccagtcccagcagacaacttgctttttatttcagaggcttataggcaaatctatacaaagaaggtgggtggttccctagggctgagggaggaagggaaaactagtgaagatggctaaatgatgtgggggtttgtttttagggtgatgaaaatgttctaaaattaattgtaatgatgacggcataactctcgaaaatactaaagttaatgaattctatactttaaatgag

SEQ ID NO: 368 - DNA, 271 bp, Homo sapiens
ctccagctgcatctgatgtcactgctatggcagtgaagaatgaaaaccaaaggacaactggctacttaaggaattaagcggactaaaatgaaaaccattcacagaagcagttccagtactctggctgagactctgttttcctacatacagcccacattctgaatatactcaaatctacgcaatttcaaacttagaaaactttaactgctgccccactgaagccattttcaagctggaatcatgtataataaactactccatctatttcacc

SEQ ID NO: 369 - DNA, 303 bp, Homo sapiens
ctccacctgccgagttcacgccattctcctgcttcagcccctcgagtagctgggactacaggcgcccgccaccacacccggctaatttttttgtatttttagtagagatggggtttcaccatgttagccgggatggtctcgatctcctgacctcgtgatctgcctgcctcggcctcccaaagtgctgggattacaggcgtgagccaccacgcccggccgctcttttcttaaatatctggtggaggcctcaaaatcaaaatgtctaaaacagaactcatcatcaataaagccattcgtccattt

SEQ ID NO: 370 - DNA, 185 bp, Homo sapiens
tttgtattcaagacagaaaggaacacctacccaggagctcaatcacattgcatgcacagacaccgacaaccacacagacgtgtgaacacatccccccaacgtgagcaaccgcagcataatgggactcatcccatccaaatacccatttcatctaaagtgtaaaaataataaaaagaacttcttgg

SEQ ID NO: 371 - DNA, 294 bp, Homo sapiens
gcaaaacattctctgcaatgtggggtgagtggcaatgagaacacctcagaagacactgggtagctttttcaaactcttccctccacattgagattcagatctcagaagtactgggggaagagggttgagacttgtggattataaatcaaaaaaacctgaggttctgctgcagcccttcctaccaccacgccgcacctccctaccttgagaatcgctttctgtctgttttgatgagaacactactttcgccccaaataatccatcatactgctattaaaagtcaagttccaaacc

SEQ ID NO: 372 - DNA, 512 bp, Homo sapiens
  misc_feature (1)...(512): n = A,T,C or G
aaaacctgtggctggtctgggtattgtcatggttcctcatctcttctggaagcacacaatgagagacggagtctcattctgtcgcccaggctggagtgcagtggcgtgatcctggctcgctgcaagctccgcctcccgggttcacgccattctcctgcttcagcctcccgagtagatgggactacaggcgcctaccatcacgcccggctaattttttgtatttcgtttagtaaagacggggtttcaccgtgttggccaggatggtctcgatctcctgaccttcttgtgatctgcccgcctcggcctnccaaggtgctgggattacaggcatgagccaccgcgcccagccatatttttaaattatctaaagaatgtaattagattgtttataatttaaaggatgaatgtttgaggagatgaataccccattctccatgatgngcttatttcataantcatgcctgtatcaaaacatctcatgtaccccataaatatatacacaaaaactttat

SEQ ID NO: 373 - DNA, 231 bp, Homo sapiens
  misc_feature (1)...(231): n = A,T,C or G
aganggtntctnacgatgntgcccacactggccttgaactcttgggctcaancgancctccngcctnngccttccaagtacnctagactanaggnacangncgctgntnantgatgcacttttaatcccaatttttaggagctctgtgnaatgttntcaagcattttccattttttaatgatttaagtatttgagcactttgagctaattaaatttgaaattgtttaaaat

SEQ ID NO: 374 - DNA, 262 bp, Homo sapiens
  misc_feature (1)...(262): n = A,T,C or G
accaagactgaaattggcctgcagatcaaagaccatggcaaaaaattcctgacattggaaactgccttccaaaacatccctgtgcctcatccctttctacacattccatataaagagattgtttcattttccacctggcaacgcttaaattgttttatttttcttcattaaaaccaccacgcctcttcattcaaaaaaaaaaaggncagngnggccaattcagctnggacttaaccaggcngaacttgntcaaaaggggggg

SEQ ID NO: 375 - DNA, 638 bp, Homo sapiens
  misc_feature (1)...(638): n = A,T,C or G
cctcgcgggttggagggaacaaaactcttcgcgggtctttcccagtgggggaatccgaacgggtattcgaataaagcttttgaatgaagcccgccacaatggggaatcgggcccatttgaaacaaagaatgggaattggcacgccaagggttcttcccggcccggctttggggtgggaagaaggcttattccggcttattgactgggggcacaacaagacaaatcgggcttgctcttgaatgcccgcccgtggttccgggcttgtcaaagccgcaaggggggccgccccggttcttttttgtcaaagaacccgacccttgtcccgggtggccctgaaatgaaactggcagggaccgaagggcagccgccgggctatccgtggggcttgggcccaccgnacggggccgtttcctttgcgcaagcttgtggcctcgacgtttgtccacttggaagccggggaaaaggggacttggcttgcttattttggggccgaaagtngccccggggccaagggatcttccttgggcattttnaacctttggttcttngccgagaaaaaggaatncccattatngggnttgaaggccaaatgggcgggggggttggaanaacccctttggaanccgggtttacccttg

SEQ ID NO: 376 - DNA, 432 bp, Homo sapiens
gaggaagagaagggcagggagcaagagtaaaggctttggagctcagcaagactgggttgaatctcagcctcattgtttacttgatgtgtaaaagcagggcctcactctgtcacccaggctggagtgaagtggtatgatcacggctccctgtaaccttgaactgcttgggctcaagcagtcctcctgcctcagcctcccaagtagctaggaccacagcaactgaagcctcctgccaacagccatgtaagtaagccatcttgggagcaaaactatctggttctcttcagaccttcagatgactgcagcctcagctgacatcttaactgcaacctcatgagagaccctgagagccaaatctacctttctgagcaactatcaaacttctgacccacggaaactgtgagataataaatattttttgtttaaaccatg

SEQ ID NO: 377 - DNA, 410 bp, Homo sapiens
aatgcggagtgcccccgaaaagtgcctcccaaaatgtctcaggtcagagctgcaacctgcgcaacaacggctaagatgaggaaaaccaagacacagaaagaaaaccattttgcataactgacgaacctggatgagttcatcaccaaactccaagaaccctccgctaggtctctgcctagtgtccatgaaccagcagcaccctcattacctgggagctgaacagaaatgcagaatcctgcacccaccccagacctactcaatcacactccgtttcaacaagatctccaggtcatacgtacgtacagtacagtttgggaagcattgctctaggacagaaagagtttctcaaaattattagatgaatgatcttattagacccatgctctaaataaatgtaaagataatttttg

SEQ ID NO: 378 - DNA, 195 bp, Homo sapiens
  misc_feature (1)...(195): n = A,T,C or G
tctggggagctcctggttagctccngctgagatactatnanactctgtgaagcccggattanaaaaaagatncaaaatacattccgaggagcanatctttctgtggtaacactgcattccanatgtgcgaaaaagacagggaaanacatgaactgcantacattacggctaaagggagnnngcttattaacttcc

SEQ ID NO: 379 - DNA, 241 bp, Homo sapiens
  misc_feature (1)...(241): n = A,T,C or G
ggagaaggtcaccgtgatgtgatggaaaggcagaaatcaatggtggctggctcctcagtgatatgagtcaatccatcagacagactggtggcagncacccagccttcacagctaccacccccatgctggcaaatgtcacatttggaattcatttgcatagctgggtagcactccctgcggagttacattgaacaattttgcagctgtgacagcttgaaatagaaaagctaatgcaactatc

SEQ ID NO: 380 - DNA, 357 bp, Homo sapiens
  misc_feature (1)...(357): n = A,T,C or G
ccntcttcttacaaatgancngacncagatgcganganncncaacgtccacatnnttgaagcaaagttacttgtggataaacaaagcattangaaatggactctcatntctctcaaaaagtatcaaagaagtgaaattcatcagaccactgtgtcnagacaatgagacgccnnatgccagattccttanttgncatgattgcttccttanccctccctagttcctgttttcctgctcataagttacatttcttccttgctatataatcccctaatttcggctggttgaggagatggnatccaaactgatntcccatatccttagctgtagcatgcaattaaagccttcttccttggc

SEQ ID NO: 381 - DNA, 329 bp, Homo sapiens
  misc_feature (1)...(329): n = A,T,C or G
atatgctgcttggcaacnattatatcacacatcacatacgtctggatcaagtgttactttgcaaatattcagctatggcattaaagatcctttcaagaacccttttgaatggcttctctaggtgacacagcaaatggattcctaagtatgcatccattctcccgggtaaaccacgagtctcaaaaagtaggcagcaggctggacccggtggcacacgcatggaatcccagcgctttgggaggccggggcaggaagttgcttgaggccaggagtgcaaaaccaacatggcgagactctgtctgtataagaaataaaataaattatccagg

SEQ ID NO: 382 - DNA, 443 bp, Homo sapiens
  misc_feature (1)...(443): n = A,T,C or G
atgtggacaacgaacaaagacaatagagcagaagtgttggcaacacttcagtatgagcagactggtggacagtgagagattacagaagaacacagctctgggccagcagtgctgctgtcgaggtgatcccagcaggcagtgccacccaccaggaatcataaactgcacaaggccagaggtgagtccttctgtaaatacatagccctagctccaagcatttaattgtcacaaaaacaacaaaaaatactcctattaacagtgcaatttctctttccaaggtctacatcgagagaaagaatattaggatgctaatattgcattgggtcattggagcttaatgtttagaaataataaactaaactgttttgtggtctgaccaaaaaaaaaaaggccagngnggccaattcagnttggacttaaccaggctgaacttgcttaaaagg

SEQ ID NO: 383 - DNA, 460 bp, Homo sapiens
gccttcattatctcacttcacaagaagtcaggtgccaagcagatccaagctcattcagaggctgcaccatgtcaactgggacccaggtttcatccatgtttctgctctgtcattatgtcatactccaagggagtcgccagatgactgctgcagctgaggcttttctttcacagcatctaacagaggctggggagaggctccatgaagcacgtggtttcctaataccagaagaaaattcaagccttttaacatggcagtccacagtggtaggaggcggaaagagactttgggtattcaaaaatgggttatcaccttctacttctttggctgcatgatactcagagataccattcatgtctatatctaaatgacactcatttttttcctttctaaaatggagcacctggctccaaagttcttggacatctgggtgatgcagtggtttcttcatttatccctt

SEQ ID NO: 384 - DNA, 426 bp, Homo sapiens
ttggttggatccatggatgtgaaacctggggataggaaaggcatactgtatcccctgccttgtagcagctcacaatataatggggaatggttccctgccagcgaacatgctgtgtttcgttcaatcattcaaaacatttgagtgtccactgtgtgccagacgtgctggtccctctgctgtgcacatcatcctccttggtgtgatgctccttcgaggctcagttcagatgctacttctctgcttggcttttccagactgcatgatacccaggctgcctggctgggtcttcccatgtattccacccctgacctgtactggccctgttgccaactatttatcaaattatgtgattaatatctgggtattttcttacactggacctcactcataagggcaggagctctgtcccgttcacacacgatcctt

SEQ ID NO: 385 - DNA, 250 bp, Homo sapiens
  misc_feature (1)...(250): n = A,T,C or G
gtgggaggaggaagctcgccaagcgcatgaaccttcagaccatggtggacacgctgcaggaggcagcacaggaggctgatgccatccaggaggagatgaatgagaagatcgagcggctcaaggccgagctggtggtgtttaaggggcttatgagtgaccccatgacagacctggacacaaaaaaaaaaaggncnnngnggncaattnagcttggacttaaccaggntgaacttnntcaaaagggggggaa

SEQ ID NO: 386 - DNA, 165 bp, Homo sapiens
  misc_feature (1)...(165): n = A,T,C or G
ttgttgcgnanangacaccaacatggnatacgaacccaacggtggggagaagacnnanctgntcagaannccccaggagtaaaatgcagcctgtattacccttcctggagtgtatcctacttggagtcttcttgttctgggaggcaataaatttctttgttattt

SEQ ID NO: 387 - DNA, 397 bp, Homo sapiens
  misc_feature (1)...(397): n = A,T,C or G
ctcctgcgtttctgcagagctcctgcattanntcaganctgcnatgnnatctggnctgantngtgtctctccaaattcatatgttgaatacttaacctgccatgcgattgtnattgganataattcctttagggaagcaatgaaggttaaatgaggtcataggtgggagcttaatccaatgggactggggtccctacaagaagaggaagacaccagagctctctgtctccacacacagagaaaagaggctgtatgaggacacaagagaaggtaatagctgtctacaaaccaagaagagaagcctctccagaaaatgaaccctgctggaacttggtcttggactttccagcctccanaactgggagaaaataaagttcaaaataaagttctgttgtgt

SEQ ID NO: 388 - DNA, 232 bp, Homo sapiens
  misc_feature (1)...(232): n = A,T,C or G
gcgtttccacactgtcttactgtccggaaagagcaaacacggtggaaagggacagaagagccagaattccgtctagtttgatcactgatttgctgggtgacctggtgcatttcacttcgcctcagtctctttatctgtaatatgagaatgcgcagatttgcctcctaagtgtgatgtgagaattaggtgagagttggcaggcactaaanaaaaaagcatgcattaatccttt

SEQ ID NO: 389 - DNA, 167 bp, Homo sapiens
gtaaggaaacatgaacctggagagataaagtgacttctcccaagattaagtggtctctaaaaggcagtgccaggactcagacttctgacttgaaatcagagtttcttttcatcatcacatccttcctttctaatctgttgttaataaaactcttggttttctaggtc

SEQ ID NO: 390 - DNA, 187 bp, Homo sapiens
gtcaccagtggctaagcaagacccacaggatgctgccaacaggtctgaaggcttggtacacagtagggagaaaacagagaaggtgaaaggaagatgggcaaaaagaagagtgttaagagagaaagaagaagtatttgagatcctgccactgcactccagtctgggcaacagaacaagatgctgccag

SEQ ID NO: 391 - DNA, 282 bp, Homo sapiens
gtttaaggaggcacaaatccaggtgttcccacattaccaaattactactctgtagtttgaaaggaatgacaatgacatcctgtttctggtcatggctaatttagtatacactgcacctgtaaaactccaggccatcaacatttcaggaaggctatgtaatcaaagtggtgacacttactactgagaattattggtgacttccagagtacagcacaagccctctctccacctgactttcaattacaacagagggtcagaagagtccaataaaggcagaacctg

SEQ ID NO: 392 - DNA, 146 bp, Homo sapiens
caacatggagacaatgttttcctgcattcttcattccagaagctgatggaggaaaggccctatgagctgtgggctggctctataggccccactgtactttagggaattccagtagcaaaggaataaaatcattttagtcactatgc

SEQ ID NO: 393 - DNA, 190 bp, Homo sapiens
tgtcaaggtcaaggtgttgaacgtctttcgagtcacgagtaaccagttatattggctatttcagaatgctttacagccaaaaagtccttgaacgaaggaagaagtccactaagtctcatcagcaagggtccagctcctcttcatctgcatgttttgaacaataaaaatgactaccactttctgagaacct

SEQ ID NO: 394 - DNA, 303 bp, Homo sapiens
atggaaatcagcttccagtgtgaaccactctatggacagactcaaatggaaaagaactgatggagaccctcagctcacgactggcaaggaattgacatcctcagttcaaaaacctgtgaagagctggatcctgccaacaaccacgtgactgagcttggaagaaaatccttcctcaaatgaaccttaagatacctgaaaccccagtggaatccttgattgcttaattgtaagagactatgagcaggaatatccaacctaagtgaaaacacaggaactgtaagataataaatgtgtgttttaagt

SEQ ID NO: 395 - DNA, 117 bp, Homo sapiens
gtggctgtgatcttgaaggcaaagacttggctttatagcacccagcctatcagccatcagtcaaaaaaatggaccaagtgttgagtcaattaacttttcttaaattctcttgaccag

SEQ ID NO: 396 - DNA, 244 bp, Homo sapiens
gcagagaacacatcatccccctggaacgtgagtcatttgtgaaatgcttgttttaaattcaaacttcttcacaacctgacgagtgtgtgggagacccaaggaagctgacatacaagggcagatttatttttctgccagaaggaaccatcaacacaaaggccaatggtaaccctaaaaatggaaatgtgctaaccctttttattgtcaagcaaataaaaaaattattcttcaaaggaggagaaac

SEQ ID NO: 397 - DNA, 168 bp, Homo sapiens
  misc_feature (1)...(168): n = A,T,C or G
taaanttgaaagtagctgatatgggaccacagaatattggccaatcagtgttttacataatgtctgtggagtggccatgtgctctagaagagtgagacaaccttggcataaccttctttaagagccaatcacataacactgtgaatatttataaaattttagaccatt

SEQ ID NO: 398 - DNA, 477 bp, Homo sapiens
  misc_feature (1)...(477): n = A,T,C or G
gcgtctggggagctcctgcgattntgnggagctnctgcannaaggctnantgnaanatntntgctgnantattngnnatcnacantgaccatctccaggtttctacattggaatccaacttcacaagaatncacttgacccactatactggaggaaacttccctgcatggctagcctgggatgctgtgggtcacaagcccctccctagaagttctcctgagtatctaactgcagtccctcacactgnaacttcttccacgctgctgctttgtagtctctcttttaaccttacacatcaagaagtccttctgagtatccctgcaatgtangatgaagcaatccactacccactcctgcactgctctgctcagaaccagcaccctccctcacccccactcccatccatgccaagaatgctgcacttcttccccgtgagccagggtcagcccgaggagaggggcacaagcacagggcctc

SEQ ID NO: 399 - DNA, 261 bp, Homo sapiens
  misc_feature (1)...(261): n = A,T,C or G
atgaaatctcagtacagacgcacttttttgttaaatacactancaaggnagttagtgtattttgcnnagaaaatgcnanatgnttggaatatcttcaacattctcanatgtgggctctaaatccaacaataattatccttataagagacagaagaggcacnnatacnaaagagaaggccacgtgaagggagtgtggccctgctgacatcttgatttcggactttancccttnggaacttanataaacctctgtaagctacc

SEQ ID NO: 400 - DNA, 139 bp, Homo sapiens
atgaggaaactaaggctcagaaagatgctttgcccaacatcagctcatcagtactgttaacttgatgttctactcttggaagctttcatctggtagcaccatgaaactgaagaataaatacaagttagtgcatttattt

SEQ ID NO: 401 - DNA, 415 bp, Homo sapiens
actcatttgttctagattcagatcattcaacaaaacatggcatgatttccacagtctctgacattctgattgcattgcttgagaaaattctcagtctgggaatctccttaaaatgcagcacagatgatggctgaataggaacagctccggtctgcagctcccagcgagatcaacgcagaaggcgggtgatttctgcatttccaactgagaacaacgaagaaaaaatttcttttaaagaaaggccaaagaattattatagatcttttctttcgacattcctaaacaagaacaggcctagatggtgtcattttcaattcttgtcctaactggtcagtgaccaaaacctctaaaaattcacaaagaagctcatgaggaggtccgaggctgccaaaaggcatttggtctctggcccaag

SEQ ID NO: 402 - DNA, 360 bp, Homo sapiens
ttctcccagaaagcctacatgaatgagccactttatcacttctcttaaccatggaagtaaagtctaagagatgaggaaataacacttctggaatgaagccatgcaatccctggaaaggaacttagcatcaactcgggcagtgacccactgtgaccctgttggttggccataccaacacctgccgggcaaaaccccatgcctgaggacttctctgggctttgctactaccaaacctttaatgccgggtctaagatgaatgaaaatggttttctatgaagaccagtatataaggacagagcaagattcctcatcttcaaatatttattatttccttcttctggtattagcaaatttggcttt

SEQ ID NO: 403 - DNA, 433 bp, Homo sapiens
  misc_feature (1)...(433): n = A,T,C or G
gacctgcctcttctggacatttcgtataaatggaatcgtgtaatatgtggcctttcgagctgggcttccttcactcaacgtcatgtttccaagatccatccccattgaagctggtgtcggagcctcactgctttctgcgggtgggctggacctggtgacttgcttctacctgatagaatacagcaagagtgatgagatgtcacttccgagattaggttggacggatggtgacttccagcttgttagtcttctctcgggctcttcttgtttgcttgctctggtgaagccagccaccatgtgggttcctggcatagagtttctaaaaccactggaatttcctaagtaaaaggggtgagagaagtgtcttttgttactcataataagcccccttcaaccatacttgagtttattctaanaggcctagttgacctct

SEQ ID NO: 404 - DNA, 385 bp, Homo sapiens
  misc_feature (1)...(385): n = A,T,C or G
atcctgactgcaagcttagtcaactgtattcctggcncctacgtaacaatggcttgcacataatatgctcaaatgcatgtcaaaatgaatgaaagatctgcagcacacaaggctatgcctatgtactggaccagaggcagaatatatatgtagcagtttccaagagcctatcaaggacgtcagggactcgctgacacttcttcccaaaccagcagnctgggaaccatggatatccatcaagaaggggaaaggtagcacttaaaaccccaacatttaaatcttaanagcactgggaagtgggacagatnccncccacctttttttcaaaggaacggaagggcctaccttcagccaaaacaangtaaggttttttggtttggaaaat

SEQ ID NO: 405 - DNA, 416 bp, Homo sapiens
atctccagcaggtagaaaggatttgtttcttgaccatgcaaagtctgagtcagactgccaggtctcctaggctgctgccctccatacggtgactcagcaattcagcctgcgtctgtctcaacacaaggcttccagaatctccaccgtggcacagaatgagagctggggagtcctgcaagggctcttcatggcctcagcctggaagtgattctcctcactcacactcagagcacattggccagaatgagtcccaggccctcatctaactgcaagggggctgggaaaagcagttttcttgggtaactgggaaggaaaggcgagtacacatggatgagcgctagaagtctctaccatagcagctggacaaacaacggtggaggagcattccaggcagaaggaacggaaaaggtgaagac

SEQ ID NO: 406 - DNA, 256 bp, Homo sapiens
ctagaatctttacttatgtaactgaaaattcaatgaaatgaattagagccaatggacagtgaagatcattgttctcagagaagttcttcatgttatggatccgtgactccttaatacattttcctacttttgaagaaattgaactgaatttattctatttatataacaggaaagatgccaaactgtggatctgcttattcaaagtgactgaattttgtcaggctatttatcaacaaataaagtatttgtaattatg

SEQ ID NO: 407 - DNA, 558 bp, Homo sapiens
  misc_feature (1)...(558): n = A,T,C or G
gtttcttgtgttttantnnncaaaactgtaggaatatacanaantntgggttgngngtcanacattttcaaanggggcatntnaaaaaattcncgngnggacccccancncnccncagtntntcccccccccaaaggggcaanccaccngtacccaanaccnttggcacttttggtcttttgggaagtccccggtttaccttcttggcaagttttattcctttggggattttncccaggaanaacttacccncggaattctnaaaaaccggtgccncttgaattggttcccaccancattttttcatttaagtagccccaaaacaaccccagaattaaatgggaccaaaatcttatggtgggggcattataccccncaccatnggatgaatttacttcanccntttaaagaagggaaatggaggggcccttgctacatttcttttcaacatnggatngggattaaaccnttggaaaaccttggatgcttaagtnaaaaagaagggcaggtccccaaaagacttcatttgggatgaaagcattnccagaacaagggcca

SEQ ID NO: 408 - DNA, 419 bp, Homo sapiens
ctctactagagaccataataatgcagtgaatttaattatttcatagagatgaaataactatcttcagggatatagaaaatgtaccctcctcatcctgacaaaattttgcagatctctggagggctatacaagaagaaatttcagagaaaccctaaacaaactccacagctctttgcaatgccaggaagaatttttaccattatataaatgttaggtttaatttaatcattcacataatgcctactgatgcattctcttgcatagcatgtgatgtgaaatttgtgatttgccactattgtattaaaaaataagcattaattacacactaaaattaagccatttgaatcttggaggaggcaaaagccaaagaaaatgtgcagctggtcaggaagtaaatccagggtggagaaatttttgtc

SEQ ID NO: 409 - DNA, 447 bp, Homo sapiens
  misc_feature (1)...(447): n = A,T,C or G
actttgagcttcanancactgggatgctgcaaaagccctgctcattaaatcggaccggctagacatggaacangcctgcagaactttggagagtatggtttggactattcctgcactcagcgatacgggacaagcacagaatgcaataatatttaagtttgttcaaaaagccaaatgcttttgcaaaatactcttttttatttaataggaaatagagattgcttatggaagagtgggatgggaacctgtggaaagacatcttaaatccaacccctggcagtctgacatanggctgntgncaaatccccatagncacactcccaatcacaatgcttcttagatcccctaacccaccgcancctaaggcctacaaagacagctcaatggctgggcncggnggnttacgcctgtaatcccacactttgggaaggccnaggcgggccggat

SEQ ID NO: 410 - DNA, 167 bp, Homo sapiens
  misc_feature (1)...(167): n = A,T,C or G
agtctgggactcctgcattaagtnatanctgatacggncggacangtagggatcgtctattgnatgtgaaaccagagatgcccgccaacctggaatagagaggaagagagcaggcagatttgnacctatctgctttcaagctggtcatcatgatgaaacttagacac

SEQ ID NO: 411 - DNA, 255 bp, Homo sapiens
ggttgcagaaaaggaagaagaatcagcagagagcatttgtggccagcaaagcttaaaatatttcctaaccgatcctttgcaagaaaagttcacccactcctgtagtcagcagctcccctactgtgcgcagtcagtgtgccatctcagactagcaaagatttgtgcttggatcatctacacttccctgaatgctgaagaagatatgctatccatgcaatccttgtcgactgcttgattaaaaagtggataaactgt

SEQ ID NO: 412 - DNA, 111 bp, Homo sapiens
  misc_feature (1)...(111): n = A,T,C or G
angtacagtacaaaatgatctacaactattgagtggaccaactgaaatcatttgtcaatcctctttgcaaatgaacttgtgcaatgtattaaaacatttttaaaagttcat

SEQ ID NO: 413 - DNA, 561 bp, Homo sapiens
  misc_feature (1)...(561): n = A,T,C or G
ganntgntnttgcattacctcanaagctagtcacaggagaacaatgatttgctctggcaaggcgaagacagtaccaagtcattgcntnatctncactcacattcngagttcctgagcagctgctctggaggtggattaaaataacccatcatttcagtttttataacccattcagcatttaggaataacatggatggttgaacccatggatacagagggccaactgcacatacnatgaatgcttgaagtgcactgatcttcagtgaacagctcactgactctttacaggtctcaaactcgtgagctcaagcgatccgccacctcagactccaaagtgctgaaattataggcatgagccaccatgcctggtcagcattggggagtttcaagaactattccagcaaaggaggggaacttcaccaccgctgcatgtctaccttggaaagtcangcagcattgcttctgctgggttctctttgntacaaatattgaaaatttgctacctgcacctgctgtgttcccaccctctggagacctgggaacctggctgcacctgggaag

SEQ ID NO: 414 - DNA, 569 bp, Homo sapiens
  misc_feature (1)...(569): n = A,T,C or G
atgaggaactgaggcatagtagtaaaacaacacacctgatgtcacccagcttcgcggacagtgggagagccagcgccccccagctccagtcaggtctcactccctgcaacacgagcaaatggacatggccatgggggcgaggactggggggcctgccgaggagctggagccatggggtccccagaagtagaggcctagaggcagcaccggtacccactgcacctcagggctgctcggtgaccgctctcagggcagccctgggctgttctcaagatcaacttcaccctcaggagactaagttatgcccagctgaggatgttcacaaggacacactgcaggccctagaggcaatacccctggagaggctccaggcccacggaggacgtggcggccggtgagcaatccaaggccctgggcccaaggtggactggggtttgcccttccacctgggacattccaagttcacgttttctcangtctcatttaacaaggaaaaaatagtacacacaagcactcacgtccacaaacaacttcttttcttcctnaaaaanggaaaaccacctgggcca

SEQ ID NO: 415 - DNA, 433 bp, Homo sapiens
  misc_feature (1)...(433): n = A,T,C or G
cctatctgtgnngtgtgntnnatgcactggggccaancacttnttcggatgctgntacaacaataatgaagttaccatattgctccagacaagagatgctcatggcctcatggcctgaattaagcagttgcaactgaaatantaaaaagtggccatggttgagatacattttaaagatcgaatctacagaatataacanaggattaggtgctgtangaaatgagaaaagactgatggccagttttggattcagcagtggctataatcattgtgctacttcttgggggaagattggtagagatatgggataggagggaaaatcaaagaagttnccattttaaaccccgttaaagtttgagacaccaataagatatacaagttccaaaggtcaattaccagttttggatatgtgaattcaaaaaagtatgagctg

SEQ ID NO: 416 - DNA, 265 bp, Homo sapiens
atttttgttcagattgaacccaagaggactcgtgactcatggctcaactggtcctatggctccacccaacagcaagttctgcacacccctatgattgcttccccaacgaatcagcagcagttattccctagccccctgcccatcaaattgtccagaaaaaccctaagccccaagccttcagggagactgatttgagtagtaactccatctcccgcatggcatagctggacttggattaattaaactctttctttattgtcgtgcc

SEQ ID NO: 417 - DNA, 501 bp, Homo sapiens
  misc_feature (1)...(501): n = A,T,C or G
gtaangctgatctgnngatgnttgtggcngntgttnnaccctantgcacnctgatttgtgcctcctccttgtccccacgtcaagagagagcagcgggacgagtggacccttnggaatcctacctggggcttcccttccaggtggaagggaagtaggagccaagatgcanactccctgaccgcaggcgctgggccagccacaatgccatcttgcccctaccctggtttatgattgtttttcacctttgggcccttggccagagaattccctctgcctccaatgtacgccatcccctcctttcctttctgcctgggacactcctgcctatgtgcatgggccaggtctggcctgctgccattactatgtggccatgagctaagaatggttttatgtttttaaatggctggaaaaaacatcaaaggaagaattctattttgggcatgtgaaaattatctgaaattcaaatatcaagtatccacaaataaaattaaattggaacat

SEQ ID NO: 418 - DNA, 324 bp, Homo sapiens
tctccatgtggtctgacatctccagcaagatttggcacactgtggatggagcaaacctgcctctggaatcaaatcattatgccgaggcatccaggctgagggtaacccaggatgaaatgtttcccaagatcactgggaccttcctacccacatgaggtcatcaactgagactggctttctccagaccagacttggaggttgatgctatcttcacaagtgtgcaaaagtcaataagagttttgtgtaactttgctcaggatactttgaaaaattgtttaattttttatttctggttatgcatattttcaactattaaaaccatgc

SEQ ID NO: 419 - DNA, 433 bp, Homo sapiens
  misc_feature (1)...(433): n = A,T,C or G
agtctgggagctcctgctnagactnctgcattaagtcnaactgangttgagaaggattgcagcaatgcaatgggcacaccagcaggctcttgaaggcactgccatactgcacagcttccacaggcctggagcctgaatcctctgagacacatcgtccctgaaattgaaagattggcacttcacccacacctgagacgggaaacatcatctcttcctaggaggacctgtgtgaccccgcctgcatgaaaggtttgctcactcggtctgcagtggcaggcccacactcggcattccccggagtcctccagtgcctgcgtgcactttctcttcttggttggaggcaatgaggctctaaaatcaaagacaccaaaacgaaggntaggattcttccttgngtccatgntatgttaaataaaaattaatcttccaagcc

SEQ ID NO: 420 - DNA, 449 bp, Homo sapiens
  misc_feature (1)...(449): n = A,T,C or G
tngctgncgntgccanngangctctatggaatgngnccctgccngtgtcanccccnagttccaacctccaaagcacggntggagagcagnggngcaatctcggctcaatgcaacctccgtctctccctggttcaagtgattctcctgcctcagcctnccgagaagctgggntaacagcgcccccnttttacagatgataccattgaggctnatcanttaaatnncctggcnaaggccacactgtggaactgggattccaatcaggtctaactccaatgcaatactccttccattatactttctttaacctgccatactaacatagcacatagcctgcgacagtttaaaaaaaaaaatcctggcccccttaaaataagtgattcattatttttttaaattataaactgctactgccaaatagaaaagtaaagtcgtttcattaaaaatgg

SEQ ID NO: 421 - DNA, 308 bp, Homo sapiens
atattgaactgaaaccaccattgagtcaattcctgtggagcctctgcctgaaaatgagataaaagtcaagatgttgaaaacgaaattttaaagggccttgtcgaagtcatcggcagtgaagaatgagatgttaaaatcagatgtgatatgcatggggacaggagccattcaaaggccggtttcatcactgaacagctagacctccgttctggttggccaacctcaggagctgatggatacaggttggaaccaagcccaggggtcctccggaagaatctaaaacaggcaaaataaaatgtcttccaaac

SEQ ID NO: 422 - DNA, 327 bp, Homo sapiens
tcttccctataggataatgggagtttaaagatgatcagaagacagttgggagcagagtgagaataagaaccctcaactgctgtctcacctttcagatcacgaagaaagttttttacaatgagcagaacactcaacctgaaagcagaatggattgagtcactgcagccgtggcagtggaatggtgtttgatgttggcaaaggaaacatgtacttctagactggacagttttcccttagtttacagtttccaaatagagacatcactttgaaataacatggagaacatacatggatgtactgaacgaagaataaagtctgtgttgcaag

SEQ ID NO: 423 - DNA, 284 bp, Homo sapiens
cagaggaagaggagcgactgaagaagaaagagggtggaggtgaagatgtggagctcatattgaatctttggaaaagtgaaaatggcttttagtatccagtaagaagagtaaatagaagaattttagccacaaatggaaaagaaaacgtctcttcctcagctcaaagagacaagctcttgtcagttcctgtaaaatttaatgctggtgggcctggaagcacatttctcagacaccctagcaaataggaatgaccaagtaatattattttgccaataaaaatatgc

SEQ ID NO: 424 - DNA, 464 bp, Homo sapiens
  misc_feature (1)...(464): n = A,T,C or G
gtatattacgttcttatatgaatgacagacnanacatggaatttgaaggaaaggaagatgaccgttaaggtggtanggcctttgancccaagctaagccatcatatcccctgtgatcttgcacctacacatncagaatggcctgaagtaaggtgaagatccacanaagaagtgaaaatagccttanctgatggcattccaccattgtgatttgcttctgcctcaccctaactgatcaatgtactttgaaatctcccgcacccttaagaaggttctttgtnattctccccacccttgagaatgtactttgtgagatccaccctctgcccgcaaaacattgctcttaactccaccgcctatcccaaaaactataagagctaatgataatccccaccctttgctgactcctttttcggactcagcccacctgcacccgggtgaaataaacagccttgctggtcacac

SEQ ID NO: 425 - DNA, 317 bp, Homo sapiens
  misc_feature (1)...(317): n = A,T,C or G
ggctctttctcacttggatgggtcccanaaaggcaactngcatgttaccaaatgncctngnaaaaagancnngtaaggaggancggaggaaggcntttaattgacagccttcgaggaactgaatcctgttggtgaccatgtgagggagcttggactccggtccccctgtgttgagccttcagatgaattggcagnccccagcttggtggcatgactgtaacgtcctgaaacaccttcagcccagaaagcattcagctaaaccacacctgtatttctgacccaaagaaattgtgagataataaacatttcttctctcg

SEQ ID NO: 426 - DNA, 259 bp, Homo sapiens
  misc_feature (1)...(259): n = A,T,C or G
agaaagagaaaatactccaaatcagaagntaatggccnccnngctttcnnnnngcnttnncnnntnannatngaaccaccntcttaaanttntgggaggataaagcatcaggttaaaagctcacctggatttgcgtgcctgagcagaaagacagaagaggcctgggacccaactagcatcatactactgcttcatcagcctagatgactgcctaccttcctatctttcttacaagacaaaataaactccgtatttgttt

SEQ ID NO: 427 - DNA, 403 bp, Homo sapiens
  misc_feature (1)...(403): n = A,T,C or G
ggaattgaacagcttggacttggagaccggtgngggttaaaccnnaattagnagggcggnngaaaaggactnccanatngaattgtgttggntattcatatcccccagcacctcaaaatgtggccatggaggatggagacagagattggagtgatgcatcttcaagcctaggaacactaaggattgctggtaatcaccagaagctggaagangcaagaaagtgtcctttctagagccttcagagagagcgcagccctgccaacaccttgattatatgcttcaagcttctagaattgtgagagaataaatttctgttgttataagccnaaaaaaaaaaaggcngncgggggccnttnagntgggactnanccaggcngaacttnttcaaaaggggggggggccc

SEQ ID NO: 428 - DNA, 376 bp, Homo sapiens
gggttcagaaaatgctaccccaaagtactttgaactgaaggtgattgggagggcctaagaagcaagaaggtcactctgagttcctcctgcctttcaatgtgagacctgccaaaagggaattctctgtcctacctcaactgaaagtagcttgtaagaacttcatctcaaaggggtactgcattatactctgaggccaagaaaagtcaacgcagaggccttcctgggtccctctcccccaatttgttaccatacccttttgtcccatcatacttctacatgattttactgaatctaagcacaaaaatactcagttgtcccctgggtgttgggcctcatttctaatgggtttcgttccccataaaactttggttaatgc

SEQ ID NO: 429 - DNA, 394 bp, Homo sapiens
  misc_feature (1)...(394): n = A,T,C or G
gcttcgcatgtnttanaggtcctacacncanattcacctactncangggattcaagtccgtcttatgttctgntaatgacaactcttnttgaagttcttcanggccgtgtgaaaangaaaagccngccgggcacagtggctcacgcctgtaatcccagcactttgggaggctgaggcggcggatcacctgatgtcangagtgcgagaccagcctggccaatgtgtctgtactaaaaatacaaaaatcagccgggcgtggtggcgcatgcctgnaatcccagctactcacgancctgangcaggaggatngnttgaacctgggaggcggancttgcattgagcntgggtcacactactgcaccccagcctgagagaaagagcaagacttccgtct

SEQ ID NO: 430 - DNA, 343 bp, Homo sapiens
atggaacccccggcatctgctcctagtagaggccagtctgggcctgacctggcattccaccctgcagatagcgagaactgctgcagcagccgccctagaccattctgcagttctgatgcacagcatgatggaagcatattgcagaagattattctggcttttgtagatagtggattaaattgggacagtgtaagaatgggaattcagatagcccatggatggacttcaaaatatcaccctctaaaattggactcaaatttcatgttcagatgcccgttttccccactgcaagaggaatccaactttcatcagatccttgcatcaattaaactttccttactgc

SEQ ID NO: 431 - DNA, 373 bp, Homo sapiens
  misc_feature (1)...(373): n = A,T,C or G
ctcctgcttaagtcgaactgaggggnntcaaatagcnatannntccctngnnacnggcngccacntccaaanggccggttcnngccttantgatgncatttccccaaaanaagngaaantggcctgttcctgccttactgatgacatggncttgngaaattccttctcctggctcatcctggctcaaaagctcccctactgagcaccctgtgacccccactctgcccgccagagaacaacccccctttgactgtaattttcctttacctacccgaatcctataaaacgggcccacccctatctccctttgctgactctcttttcggactcagcccacctgcattcaggtgaaataaacagctttattgctcac

SEQ ID NO: 432 - DNA, 386 bp, Homo sapiens
gtaaaattgacttgaagtccactcagcgtcactgtatgtctaaaaataaagaagcttggaaagcctggatggaaccctgagagacaggctagtccctcaagcagttgctaaagagttgagcggtttcttctgaagttcaagataacactaccgaagaatgttatcaccgcctcgttctacaattcgctcaagtgaatcctgctaaatctttgctcttctcacgagtcagacctactgctattagtggaaactacttatgaaatgaattttatttctaaatttctaatcatcttgcaatgcaatattaggcattgtcctctcggtccgctaacctgatcaaactggggtccctaaatccaaacacgcacatacagcgtgtcttctaa

SEQ ID NO: 433 - DNA, 267 bp, Homo sapiens
  misc_feature (1)...(267): n = A,T,C or G
gaaattattgtaactctggaattttagaaggtgactgcntgacaattctgagaggccaatgccaatgagagaaaagtttactgctactcatgatggcgcccctggaagcagaagacacagcacgctatagagggccatgtgggaaagcactggagtagctccaggccgggcttgccagtctctctgcactctggaaggagtttgcctgggttggggttgcccttgtanattccaaaccttcattttgtcaatttacttaaaggtgac

SEQ ID NO: 434 - DNA, 243 bp, Homo sapiens
  misc_feature (1)...(243): n = A,T,C or G
ataagggcctcgctctgttacccaggctggagtgctgtggtgtgtttgtgactcaccgtagccttgnactcctgggctcaagcaatcctcccacctaagcctctggagtagctgggactacaggtgagcaccgccaagcctgacctcaagttgaaatgtgatcaccaatgttggagtggggcttaatgggtggtgnttangctnngnatgaaaccattgncacnaanccaatggggatggtct

SEQ ID NO: 435 - DNA, 307 bp, Homo sapiens
agctctagtgccaaatgatgaatcttttctattaactgacccagtcttcaaaaaagaattgctagcctgagaaatgtggaatgcctggcttctctgactagtgttgacacagttgtttccagcgtgaacatacctgtacaagtgaagccatcacctgtgtatccttccttgcacagacagcggtcaagaaaaaaacctgcaacttggatccaatataaacgatgacaaatttcaaagaagtggaagctaaattaatgaaaaatgttatgcaaaatgttttataatatagttaaaatgtatgagtttt

SEQ ID NO: 436 - DNA, 332 bp, Homo sapiens
gtgacggagtgagagaaaagtcagaaccttctgctcacccaggataaatcatagtactaatgattgcagtggagcaaacttatctgaataccagacagcaagaaagttcctcttctgggagaagagttaccaccaaccaagacaacaacactcagaagactgatttttgaacgattttccaacactcacgtctcaattcctcttttctaaaagtcaacaaaatcctggagcatatcgccagttttccttacaattgatgtacatgtttgctactaatttctatggactcccttaagtcctataaattgtctaccaaatcttcaaaaaaagcc

SEQ ID NO: 437 - DNA, 392 bp, Homo sapiens
gtggcagttgctggagtaccagggcaccaagtggaggatgtggtagacagcctctaagatgcgccccctgccaatgatctctgcctccagggaggagctagaaggcagagagaaagccactcaggacttcccatcccagaagataaaggtgaggaaagcagcagcagcagccacaggccagtattccagagcagctttgggttcctgtcaagacctgctttgagaaggaggtggctgtggggctggagggctgggcctgttcctgagctggctgctggcaccacagcaatgaggcaacattgagaactgcgacacgaggcccagtcctgctactaaaccaactgtgtggacttgcatagtcacttcacccctcgggcctccatttctccact

SEQ ID NO: 438 - DNA, 351 bp, Homo sapiens
  misc_feature (1)...(351): n = A,T,C or G
ngangggntcttgctatgttgttnatgcnggtnncacnctcctggnctganntgannctcccaccnaatgctacanaagngctggngttacttacctaaacctacaatgngaagagaatntgacactatgatnccanctggaaaaccaccancacccaacatgcgngctnccaatctctcgaatcgtcactgtgcctccgaacaccacttagttccctcaaatatgtccttctaacaagcaggcgtgctttcgtgtatttagaacaaatcttaaatgtacacatgcatccaaatcttaaaattcagaataaagaaaagcagagaaggacagaagaaagactaatgctaccg

SEQ ID NO: 439 - DNA, 396 bp, Homo sapiens
  misc_feature (1)...(396): n = A,T,C or G
ctatgcatggaangagtgaagaggatgctgntggcagagaactcatcggcagcagcccccanaggataatgtacaaggcacgttntgtncagggagtctgccngcctggccaagagcacccccaaaagcacttggaatgagcccagctacnccaagggtnggagatntgccaatatcatggagggagaaatacacatctagnntatgacccagcatnccanaggcctgcaggctaacccgcctncctggaagaaaacagaaagtagagggcctgtcactgctggagatacccacgatggagacaatgcttcagcagtgagcccaggtgtcgccatgcaatggcatgagagctctgcctttgtccatcgacatggaagtgaaataaaaagaaaactt

SEQ ID NO: 440 - DNA, 350 bp, Homo sapiens
gaaccaagagaagcttctcaagggtcagattattccagctacctcttggatgcccccgaggcctctctacaaactgagtgctgactgtgaccctccatgatggggaagaaaggatcataccctttccacccttacactttctaggcaaaatacacagtaatcatcaaggaatttggttaggccctcatctgactggttccctatttcctggatcccatatctgattctttctctgtttattcccctattttggaagaccacatcctttctaaaacagtgtgcatcagaagggaagtgttttctacattctgcatcctaaaaataaatgtctctattctaccatgtgactg

SEQ ID NO: 441 - DNA, 374 bp, Homo sapiens
  misc_feature (1)...(374): n = A,T,C or G
cntgcanagggggcttncnttattccttcttcccgaaagaaggaggaaagaagggnancncccacgaaagnaaaacgccttggnngccnancccccaatttncttactttcatgggganggggaaaatgcccaanggatgcttntaaaaatcaccaccggnctttaaaccattgccccaaaaccgggtaagttttgnggtgttgggcttgggtccacttgtccctctggncaacctaacaagggagggnaagaaaccaagggcttaccnaaanggatgtttctttcctgaggggaaaccactcctatagactcctctngaantccaggaaggaagtgggnaaaacccatcttcnnttaatcacatttttgggat

SEQ ID NO: 442 - DNA, 153 bp, Homo sapiens
gtgaggcagccatattgtgaccatgagggaaagaccatgagaactgaagggaaatggactcagaacccagatattgtaaggctcctggagaaaccctggaaacatctacttctcaacgttttcgcttgtgagctaatgaaacaccctatggtt

SEQ ID NO: 443 - DNA, 77 bp, Homo sapiens
aaattccaaagaacatggaaaggagaccacaggaagaatccagaactgctgcccatcataaaatttttccatctgcg

SEQ ID NO: 444 - DNA, 430 bp, Homo sapiens
tttcttggcacgctggctgaagacatgttgcccacaagctgagggaggtccttacccgtggacgccaagctccgggaggctgcagtggcggcagctgagtctgcaggtggagaggtgcagggactgttttgcctccacctccttcaatacctacttttctttccagcaacagtcccttcccttacgctcccgaatccaccctggccctgaggctgcacctgagtaccacatcctgaccccacttgtttgcaagacgtctgcatgtccacaagtgcagcgttcatctcatctcaacaagcgatccctccggagcagacgggtgatccctaccaccttctgaacactcctactcatcatctcggtaacaccctctacctgttccatacctaggccagaggttttcaccccggccacacgtcagtaccactta

SEQ ID NO: 445 - DNA, 337 bp, Homo sapiens
aagaggaatcaattctggaccagaggatgtctccctgcctttgccctgcctgcctccccccacatccttctctggcaaggggaatgaggctgagaatgacctccatcctcaggacgaggtattaaatattcagcccatgccagagtgaggatctccttttcaccttctgtctgaattgtgccttgaatctgtttcgcgatgggtgcgaactgggtgagacacttgtcttagaaccgcagccctggcaactccacgccgcctgacctcgagccggtttccatagcctgaatccttcctctcatttgcaaacaactttcttagtaaatgatgacaaagc

SEQ ID NO: 446 - DNA, 266 bp, Homo sapiens
  misc_feature (1)...(266): n = A,T,C or G
gttcctcttgtttnctnnnnagcaccngcttaagtcagactgacccgaatgttcctcacaanaggcctacaatgagctattgcagtcaccagatgggactcatgaatgcagcaggtggggcagatggcaaggcgccctgtctgatgctgnctgcctgggcatggactgccttttccttccagaccttttcctggatatggccaagtctgaagtttcaaaatacatgttattctgaacctaataaagaaaacatatatccaaccttt

SEQ ID NO: 447 - DNA, 443 bp, Homo sapiens
  misc_feature (1)...(443): n = A,T,C or G
gggcattcagataaagccatcatatcccctgtgacctgcacgtacacatccagatggccggttcctgccttaactgatgacatttcaccacaaaagaagtgaaaatggcctgttcctgccttaactgatgacatggtcttgtgaaattccttctcctggctctcctggctcaaaagctcccctactgagcaccctgtgacccccactctgcccgccagagaacaacccccctttgactgtaattttcctttacctacccgaatcctataaaacggccccacccctatctccctttgctgactctcttttcggactcagcccacctgcatccaggtgaaataaacagctttattgctcacacaaaaaaaaaaaggncnnngnggccaattnagnttggacttaaccaggcngaacttgntcaaaagggggggggactacccccc

SEQ ID NO: 448 - DNA, 514 bp, Homo sapiens
  misc_feature (1)...(514): n = A,T,C or G
aaagaacattacatggcatttcctactgaagatgggacttagcacaaaaaccgtcatgggttccaccaaagagatcattaatgtctcaaaacgtctccaaggatacatgatctacaaaggaccacagagtgccctgcagaattgggttgaaaaactaaagaaggcaaacagagtttatggtaaggcggcagtctctggtccccgttgtgagattgggttcttcctgcctgttcctggagtggcatggagaaaagagcatggatttgcagaagagacacttgagagagagctgactgtgatggtgatgctcacagggacccttgaagacatgagttaaagatcgtagaagcatgacaagttggatacctgaatgactgtgtggatctgagtttcccagtgccctgcagtacatgatcacattgtttatgagactgactatgtctgagccanaattgattgcatctatttgatgctgcaacttaacctgtgcttaacactatctctggggaaaaaa

SEQ ID NO: 449 - DNA, 239 bp, Homo sapiens
gacatcttcactgcttccatcccgagaacttcagaatccaatgatccagaccagcccagtgcaatcaacagtgagccaaatcaaaaagcagcctacattctacctgataatctacacacaggctgggatctgctgggttctactaggtgaattgaattgctccatgccagtggaaaattttttcacatcagtttttcctagtagatgtttaaaaaattacaaagaattttccaatcgac

SEQ ID NO: 450 - DNA, 503 bp, Homo sapiens
acttctatcaaaagacataaaggcagaaccgtgggatcagcaccacacacagctgctttcttcgaacatctgaattatgacttcctgttcctgggatgatgctggggacagccaaaaagttttagagccagattccttatccaatgggcaaggaaggggtggcctgttgaaacatcctgaaatacatcaacccaaaatacgaccaacaaaaatgtggcttccaaaaataactccgccaggcgggtctgtgtgccggctgggaggaaagagaggtgggacagaaccagcttggaccttcccccatcccaggagtggccatcataccagcgtcagtgatcccagcctcatacctttgccttgagactctgcattctgttgcttgttgatggtcactttgttcatataaatgtactcctcatcagagcctgcagaaggaaggagacacaggctttgtgtgacttcctgaagagaaagggcctccactaaaaaccctgttactccaa

SEQ ID NO: 451 - DNA, 215 bp, Homo sapiens
cactttaaagatgttgtcatccaaaaagccggcatggtggtgcatgcctgtcatcactactactcgggaaactgaggcacaatcgcttgagccctggagttccaagccgtagtgggcaatgattgtgcctaagaatagccactgtgctccagcctggaaaacatagcaagacaaaaaaagaaagagaaagaaagaaaaaaaagaaagaaagaaag

SEQ ID NO: 452 - DNA, 418 bp, Homo sapiens
  misc_feature (1)...(418): n = A,T,C or G
gaaccccagattcttctccatggtcggaatcattgcaaaataactggtttccctaggatcaccagctgtcatggactgatttgtgtctctccaaattcatatgttgaatacttaacctgccntgccaattgntaatgggagataattcctttagggaagcaatgaaggttaaatgaggcnttngtgggagcttaatccaatgggactggggtccctnccagaagaggaagacaccagagctctctgtctccacacacagagaaaagaggctgtatgaggacacaagagaaggtaatagctgtctacaaaccaagaagagaagcctctccagaaaatgaaccctgctggaacttggtcttggactttccagcctccanaactgggagaaaataaagttcaaaataaaagtctgttgtgt

SEQ ID NO: 453 - DNA, 196 bp, Homo sapiens
gactttgtgctcctgtgatccactaagatatcatgtgctgagtaactgctggttcaaagaaaaagtggattcatgtggagcagacttgaacccagactcaactttacagccaactacagccaacccgcagcttggaacggaggcaggcaagctagtccgtggacccataagtgataaaaacaaatgctttcattat

SEQ ID NO: 454 - DNA, 137 bp, Homo sapiens
gttatgtaaagaggtgcctgcttctccttcaccttccaccatgatcatcagcttcctgaggcctccccagaagccactatgcttcctgcacagcctgtggaactgtgagccagttaaacctttgttctttattaatt

SEQ ID NO: 455 - DNA, 430 bp, Homo sapiens
  misc_feature (1)...(430): n = A,T,C or G
ctcagccgaatcgtcacttcctctggggaccctgtcctgacccccatgaccgtggctgcctgtggaaggtgctggtaaacatcctgttctttcccctcctggcgctttccgtgcctgtggctcttccccagtctggagtacagtagggtgttcttggctcactgaaacctctacctcctgggtttaagcaattctcctgcctcagccacatggagtattgctctgtggcccaggctggagtacaatggcgcgatcttggttcacagtaacttccgcctcctgggttcaagtgattctcctgcctcagcttcccaattctggaggctggaagtccacgatcaaggngccaagcatggtcagtttcttgncctngcttcataaggccgccccaattttgccatcttcacaaanaanaaggggtactcacgtg

SEQ ID NO: 456 - DNA, 211 bp, Homo sapiens
ttgagccttcaaccctgtgacactataaataaactgctcctggagctgcggaaattgcccattatctccaagagcatgttctgataagagtccatcaacatgaagccaaaactcattcagagcatcaagagaggaaagtttctagtgatggtttggtcatggtctctttcaggatgattgcatggcagaggaaggaataaaactgtgaaag

SEQ ID NO: 457 - DNA, 424 bp, Homo sapiens
  misc_feature (1)...(424): n = A,T,C or G
agtctcttccacagtgctgagcatgagtggagcttgctaaatcattgctaaatgaagcaatgggctgtaagcatgtcctgtgggatctgcatcttcagatcatcctgaagtactcaacaaccacatcttcttccaggaacagagcccaacataaactggtagggtttgctgtcttagacagctaagagaacgaggagtggagctagtgaacaagcagtgaagggggcagttccttaatgccacccgaactgaatttcaacagtctgacaagctagcgttttgggtaaatatcccagtatacttgtcacagagttaagtaaaatggacttccttcaaaggaagtgcttttaatacaataactgnttttggtttttttanccatgggattaaaaatttacacatttactaaatctggcatatttat

SEQ ID NO: 458 - DNA, 190 bp, Homo sapiens
gcaactaagacaatcatggggatcacactgtgttccttccagaaatccagaaagcctcagccaagctggtactggcaaagacaatgataattctcgtgagaaaggtaatcttggtgtggtgaagagggtttgcatggaatcagaagaatgggcaaaggttcctctgcaagatattggaaagaagacgaag

SEQ ID NO: 459 - DNA, 370 bp, Homo sapiens
  misc_feature (1)...(370): n = A,T,C or G
tgcctgagaataaccnnaacgtgctggagtacatcatgttctggttagatnacgggggactaaccagaacagactgactctgtccgaatcacccctggagacaggaaattcttcaacactttagcccggnangtcatgctctccagggtataaaacccaaggccagcttcgggcacttgaagacaaggactccatccacccaggcaactttcccgagcctcatgggagcaactcctcatgaatcccaggcttctgttgcttttgctgcctatctataagaaataaatccacttcatttaacctgcaaaaaaaaaaaggcccgngnggccaattcagcttggacttaaccaggcttgaactttggttaaaa

SEQ ID NO: 460 - DNA, 161 bp, Homo sapiens
cccacattgtgaggaagattttacaaccttccctttacagatgagaaggctaagcaagagaggttacataatgctcctgaagttccacggctgttacttcacactctattgcttcttaaaccaggatgcattttataataaataagtatatttggtgtgat

SEQ ID NO: 461 - DNA, 425 bp, Homo sapiens
  misc_feature (1)...(425): n = A,T,C or G
gggcattcagataagccatcatatcccctgtgacctgcacgtacacatccagatggccggttcctgccttaactgatgacatttcaccacaaaagaagtgaaaatggcctgttcctgccttaactgatgacatggtcttgtgaaattccttctcctggctcatcctggctcaaaagctcccctactgagcaccctgtgacccccactctgcccgccagagaacaacccccctttgactgtaattttcctttacctacccgaatcctataaaacggccccacccctatctccctttgctgactctcttttcggactcagcccacctgcatccaggtgaaataaacagctttattgctcaaaaaaaaaaaggccaggggaggccaattcnagcttnggacttaaccaggctgaacttgctcaaaagg

SEQ ID NO: 462 - DNA, 268 bp, Homo sapiens
  misc_feature (1)...(268): n = A,T,C or G
tcagactgagatttcccattntggccacgcttcacatgcgacacatatngaagtncacagcagcttccccccttacctgcaagggatatgttcacagatctccagtggatgcctgaaactatggatagtactgaatcctatatatactgnttttttctatacatataataaaaggttataaattacgcncagtaagaagattaaaaactcaaaatatgagttaaacncatatgcnatataatatatgcaataaaattgaaatactggc

SEQ ID NO: 463 - DNA, 287 bp, Homo sapiens
  misc_feature (1)...(287): n = A,T,C or G
acctccagtggcagacagatggatagagctatataatcatcagtggaagtgtgtgatattctgtcttcacaaaccatcgtgcaaagcagaaccaacggccttttgtctgcttttagaaatgtctgcaagaatccctcccacctgtcaagttatggggatgaatatgtataaaatgcatcatgtatgtgtacctgtagaaaacactggattgggatgtgcagaggaaataaagcaaacagttttttaaaaanncaaaaaaaaaggccaggggggcccattcccctttg

SEQ ID NO: 464 - DNA, 236 bp, Homo sapiens
  misc_feature (1)...(236): n = A,T,C or G
aatagggaaatttggatgcagagacacagagagaatgccatgtgaagatggatcagagacagaagtgatgcggctgcaagccaaggantgtgaagaatggccagccaccactggaagctaggggagacgccagcacagattctccctgagagtatccagaagaaaccaaccctccaacacctggatttcagacttctgaccttgagaagtgtgagccaataaaacaactgcagtgg

SEQ ID NO: 465 - DNA, 283 bp, Homo sapiens
cccaggaccaagattgatttttttctgcaagaaggattctcaatcactattatgaaaaaccgaatggctttggaagttagcctttgctgcagacttgaaaatgtttcttcataaactcaccctaacattgcaaggtcaaatagcactacatgagaaatttatacttcagtgaagacattttgacaaaaactaacattgtttaaatcaccagtaatgttaagctgctttatacatgtcccattctgtcaaaggttaaaataaagagcaagatcttcattcctac

SEQ ID NO: 466 - DNA, 256 bp, Homo sapiens
agcaagaactcggacctagctgcactaaggactaagcaaactacaaaggaagcaagagattggagtgattcaaggaagaagccaccgagccaaggaatgcaggtggccactaggagctgaaaaatgcaagggaaccgatgatcccctcagagcctctgaaggagccacccctgcccataccttgactttagcccagtgaaactggttctgaatttctgacctttagatctgtaagataatgaacttgtgttgtttt

SEQ ID NO: 467 - DNA, 457 bp, Homo sapiens
  misc_feature (1)...(457): n = A,T,C or G
tgcactggaacaaaaacactggtgtgccggcaaaagtttaagaaacggctctttggtagagaagcactgcttcattgtgtctgctgatttgcttaatgtttttgggtagctcttacactactgaactcctgcttggggcaaagttgccaaaaaagacttcgttatataacaacaccagaggagagcaaaagacttctagactttgggggctatttaaattctggtggagtctcgctctgtcatccaggctggagtgcagtggggtgatctcagctgactgtaacctttgcctctcaggtgtcaggcctctgagcccaagctaagccatcatatccctgtgacctgcacgtatncatncncanaggcccggaccaattgaaaaattcncaaaaaaagngaaaanggccagttcctgccttaactgatgacattaccttgngaaattccttctcctggc

SEQ ID NO: 468 - DNA, 290 bp, Homo sapiens
  misc_feature (1)...(290): n = A,T,C or G
tgcctaattcatactgganacggcagnccccccaangagtgacctatgctngagctaagcaccagccgcccttgtctngaggcagnttcatacaccacccaggancccccangatctcatgaatatgccggcactgaaagttgtagcaagaagacagnccnggccactaaaagagggaggngatcgtgctggccaaggttatcggaaatctgggagatgcagatacctggagtttcctttgctctttcgtgtcatattcaaataaaaatnaaagttttcttcagtccttt

SEQ ID NO: 469 - DNA, 435 bp, Homo sapiens
  misc_feature (1)...(435): n = A,T,C or G
gggcattcagataagccatcatatcccctgtgacctgcacgtacacatccagatggccggttcctgccttaactgatgacatttcaccacaaaagaagtgaaaatggcctgttcctgccttaactgatgacatggtcttgtgaaattccttctcctggctcatcctggctcaaaagctcccctactgagcaccctgtgacccccactctgcccgccagagaacaacccccctttgactgtaattttcctttacctacccgaatcctataaaacggccccacccctatctccctttgctgactctcttttcggactcagcccacctgcatccaggtgaaataaacagctttattgntcacaaaaaaaaaaaggggccgggnggggccatttaantttggganttaaccaggtngaacttgttnaaaaggggggggc

SEQ ID NO: 470 - DNA, 191 bp, Homo sapiens
aaacacgcagcagtaacctgacgtgtctgtgaagacagcagagcagcctgcgcctctggaaacacaccatcatctgcctctctccaaaggacgggggagacgcctcatgtgagatggaaattaagcctcagaagcagtcatttttctttatattgtttggaattaaaaacatattaaattgatccattatg

SEQ ID NO: 471 - DNA, 307 bp, Homo sapiens
acagaagagatcatggtcagtgggtcaggtccaccatgttgagcggcagtcaagtatcgcttacggataccatcacaaagaatttctaaggaaaaaaaggagaaaagacagacatacctcccggcgcaccatactacattctgactggtccagaagaatgttcaccacagttccccagagcccaccggaaatgttctgacaactgtttgctaaggccacacagcccgtttcaagggtggtcagtgctgatcctaatcccagtgaagtgaatctcacctgttcaaattaaagagaaagttgttgaatc

SEQ ID NO: 472 - DNA, 593 bp, Homo sapiens
  misc_feature (1)...(593): n = A,T,C or G
caaaanctccgggtnagaantgaccctggcaanatctggcaaacttgtccatcntattgaccgcggataacttctttgctttcatatcctgggaatctcttgctttgggtcttgcgaacttcctggtttcttgcattcctttgcgcttgcaccccttgggaccattaaaaaagaagaaagggaaccggggaaggtaagnggaatcttggaaaggggaccaacttggcacccccaaaacaaggggaaattcttgaagccacccaagcaanccacgcccaggtgggttaagcccttaagcccggtgcccatgttaagacgctcctggtgggccgtaangcacccgttaagctatgggtaagctccatgggggatcattgttgggcatccaccctatattggcaagtttctgaaaatgataaccatttttagaaaatggatgggaccaaaatgggatgccaagggtttaaagaaaanaaggtgtttaataaaaaggggcaaacancgganggnnccttccaagggggnttgaaaaactnggtttaaanaaaccttnccctgtgggtnaagggngggatancnccgaaatctttact

SEQ ID NO: 473 - DNA, 676 bp, Homo sapiens
  misc_feature (1)...(676): n = A,T,C or G
ttncctgctnnagctnaaaactngaagaaganganctgttggnactngnntngggcataanntagnntattcctncncccttggcntttgaattccacttggtggtcaaaaagggcttntgnaagccctttcantgggngangaacaaattaatttggtggaatngcccattcaaccnacccgaagcctttttgcaaccttattgaacgggtggggggggaatttggcttggcacccttcccccaggtggaaagaacccaaaaaaaggggtcacccccatttcccttaatggtccttggtggaacccttaacaaaggggtggaacttggtggctttggtncggggaacccccaagggccccaaagaaaccacaggcccgggaaaaggaaccttcccgggggggattaccaagcccattgggcttaaagggaaaggggacaaaaggaaaggtttggtcaaaaggaaattttcccaaacgcccaggggacccccaccatccccttttgggtattttggaattttcacaagntcangcntggctttcaaacngggaaatnggggcttnttnccncaccccanggggaattccctttaancacccccaaacccgggcctggcctttttaaattttttacccccaggggaangggacttcaccatttggggggccggaaat

SEQ ID NO: 474 - DNA, 421 bp, Homo sapiens
  misc_feature (1)...(421): n = A,T,C or G
cagaaactnaancacatntgtgaannctnggggaaacttacaatcatggcncangatnaaggaaanccaagcacctcttaccatggnttgatgaggaaagaaagaaagcgaagggggagctgccacacacttttaaaaccatcatatntcatgagaactcactcactatcacaanangagcangggggaaatctgccttcatgatncaaccacctcccaccangcccttntcccaacatggggggattacaattcgacatganatntgggtggggacacaganccnnaccatatcacaatccaatgtgggtgatagctgctacagnaactgtantanacttgnnagatattaactgtcattgtcttgcaaatggaggctcnctncaaaagattaatatgcancaatgggtgaaccacacag

SEQ ID NO: 475 - DNA, 249 bp, Homo sapiens
aaccaaactcaacgtcaggccgtggtttctgctcatcaaagaatgactgctgcgtgatcactaacgtgccaccacctgcacttcagtgtctcaaggtctcccctgccgctgacatttggaacaggctggtcaggatactgaggatgctggactctccttcgcagtggtctttgtataaacccaaggggaatgggaatttggagacaaaggaagccatcctggagcggccaaataaagcctttaatcttt

SEQ ID NO: 476 - DNA, 452 bp, Homo sapiens
  misc_feature (1)...(452): n = A,T,C or G
gctggaangctcntggagtgtgagcagagaggaagagtgcccagggactacaggaatttaatcaacttgagcaatcagactgttttacatcctcccagctgacagccggttttcccccaaattctgtgtggaatgcagccacatcgtctattgaaaccagctcctgacagaccccaacaacttatacatgaacctaagtgaactatcctcagttccatgctaaattctccaccgtgggaggggctacagcttcattagcataacatgagacccgtgttgctggcaggatgactcactacatctgcacaaatggggcctgtcctctatatgcgatgatccaccctttcctctctcacccccataaaaccctcctgtcgcttccttggggagacaccgctttggagaacacttgtagtgctctccttacttgtgacaagtaataaaactcctag

SEQ ID NO: 477 - DNA, 276 bp, Homo sapiens
  misc_feature (1)...(276): n = A,T,C or G
ncctncattaagnnngaactgncatngngtgtnacncattagnatgagtncacaattaaacatgaactggttcctgccgaaatgcaaaanaaacatgtcantactaagctgctattttatttgacagctcattttcctttttccctgcagtcatttgttgtttataagcaaacctgagcctccaaaacacccccaaaagtgcacacaaggagtcccataatcagtttctgactttggccctaaatcgattagaatacatctgatctgcttcaaatc

SEQ ID NO: 478 - DNA, 300 bp, Homo sapiens
  misc_feature (1)...(300): n = A,T,C or G
ttgtatggcaaccctgtaggctcctcaccggcccaagttggctttggggagacccagcccagcccagacgctccaaggaccccattggcagagctgcgaccagagaccactgctctgcaagccacgattgctgtccgggcagtctcacccacggggcagactgaatccttancttgctggtttgtgtcatcatccggcatcaggctcagttcaaatnccagctcctccacttccaagttgttggctttgagcaagtcacttaatgtcgctgcgttccatgccccatctgtgaaatgaatg

SEQ ID NO: 479 - DNA, 432 bp, Homo sapiens
  misc_feature (1)...(432): n = A,T,C or G
caaaattggggggggnttttnctntgcgccctgtgngtgtttctttnaatgnaaagnttttntgtggcaaanttaccntcgnatgcaggnatncaatggccattcagccggggcagttccagcnttcgggggacaggagccccaccccanttttgtntcccaccacntcgtgtggcgctaatcagganaggacagcgccatctgccaatcccctgggctctgacaccctttaaggtgtagcgcacacagcctcaggagccgccatgacaactgaagatgctacacgaaggccaggggatgctgccatgtcccccangcaggtgccccgcagcctgtggccccacgccatggtccagtgtgggggggaacaccnttgatttttaataaagagancagaagaccctggctgggtctntnaccactggcacttct

SEQ ID NO: 480 - DNA, 441 bp, Homo sapiens
  misc_feature (1)...(441): n = A,T,C or G
ccagcaacacagaatccacagaaggaagacaatggagctacaaggtgggagaagctgcctgggtctctaaatcactgtaagataatcaactgcttgggaaaacctatttggattttaagtgaacatgaaataaactactagcctgactcagctctcaattgactggggatgccattcaagaggagatgaagaagtctgtcttctgaattctgacctgatgtctacatacttaacaatctggcaggatataatattctcgggtcacaccttctttcagaacttgcagacactgcattatttcttttggcactgaattcaactgggagaagtctgnggccagccaaatgtttaaccatttgaaaggacttccttttttgcctaggttttccattttctttttangaactctcttttttaatcactaaacttttatttaaatac

SEQ ID NO: 481 - DNA, 304 bp, Homo sapiens
  misc_feature (1)...(304): n = A,T,C or G
ancnnctgaagtgncaanngaggctggagtgcaatggcaaaatctcacctcaccgcaacctccacctccggggttcaagcgattcttctgcctcagcctcccgagtagctgtgactacagagatgggtctcgccacgttgctcaggtggccttgaactcctggacttaaataaatcctcatatctcaacttcctgaacagcttggactacacatgtgtgccaccatgcccagttattaacataattttaaaataacatctcctgttctactataaaagtaagtggaataaaaggtcagaaaaat

SEQ ID NO: 482 - DNA, 423 bp, Homo sapiens
  misc_feature (1)...(423): n = A,T,C or G
ttgaatacaaggatgtggtcaactatactngttcttaccgttgaaaaagaagtgctgaggccaggcatggtggctcacacctgtaatcccagcactttgggatgccgaggcagctggatcacttgtggtcaagagttcaagaccagattgggcgacatgatgaaaccccgtctctactacaaatacgaaaattagccattgtggtggcacacgcctgtaatcccagctactcaggaggctgatgtgggagaactgaaccctggaggtggggattgcagtgagccaagatggcgctactgtgctccagcctgggcaacaaagcaacactatgttttaaataaataaataagtgctgagatctcagaaaattnnnnnnnnnnnnnnnnnnnnnaacccnaaaaaanggggccggggggcccattt

SEQ ID NO: 483 - DNA, 402 bp, Homo sapiens
  misc_feature (1)...(402): n = A,T,C or G
gactctggggagctcctgcttnanntaaaannngaggtngcagnaccccnntttaaaaaggggtcnngccntgtncnttgnaggaaggnatgctgcncanaggccaaaacaaatntcgacagtccttgctgggttccctcactcagtctagagtatcactatgagatcataccttttggtccaagcatatttctacatggttatcaatcatgcctatccaaggaagttttcataaaaggcctacgaggacatgatttggagggctttcagatagaggttcctggaggatgccactcccagggagggcatggagcttccaggccccttcccccatacctggccctgtgcatctcttcatctttattcattataatatcctttgtaataaaccagtaaatgtgt

SEQ ID NO: 484 - DNA, 497 bp, Homo sapiens
  misc_feature (1)...(497): n = A,T,C or G
gtatcaatcatgaagttaataagaagtgggatcctccaaaagacaccttggctttccccacagtcatccacctgttccacctgtttcaacaggtgaactcactgcaggcacagaagacatctaaggactttagaagtgaggtagcctcccaggacaccaagacacctcccccaagaaatgactccatttgtacattttcatataatgttctttctacaagaggatctttgtaatttactagacccttttctttctcaaaatacatgaggataccagaggaattatcttctaaccctcattttgaccctttcacctacaaacttgattggatctgcctaatctctgaggaacttgctaagctctggttgtcaatttatatggccagattgacagaaagtatgaaagtcctgtggaactatgtttactttcacacatgaaccagtganggaagccagttcatctggtgatgcacattgatggctcttcttggtccccaa

SEQ ID NO: 485 - DNA, 526 bp, Homo sapiens
  misc_feature (1)...(526): n = A,T,C or G
gtccagctaatgatccaatgagagcatcccaattcatatacaactttttcgattggctgtaaaagccaggtaatggataccaccaggagaggttgactggatacaccatatctcttcactcactcaaagacccaaactgatggagaagtaaacatccctaccagtcacagtggcagaaggaaagaaagctttgaagtgtcttcaactggaaatcaaattctccatcctagaagagacgatcattatttccttaatgattaattatttacaacttgnggacccggaagtcattatatgacctaccccaatcaccagggactttgtagtataattttaccacatctggaatgcagacaggcctaatatattggccaaaaaaatcaagaactactttgatcaagcntaaantaaaaggtggttttaaggaaaagttannnnnnnnnnnnnnnnnnnnnnnngggggcngnggggcccnttnngttgggattaacccgggttaanttttttnaaangggggggccccccc

SEQ ID NO: 486 - DNA, 513 bp, Homo sapiens
  misc_feature (1)...(513): n = A,T,C or G
ggcccagtgaacagagcccctggacattgccggaaggaaaggagaaagcccagcaaagcacacgacgtatcaggcttttcatgtgtcattgggtgaaagggagtcacatgggccaaggaggggaagcaggtgtcatcagagcagttccacagccctctaggcacagtaacaggcatgctttctgtccttctctccttttagattgtaagctacccaaagtccatctccatgggtttttttccttatgtgcaaactaccatatgacaggtgtgcctgacaataactcaggtatagctgagaatgatcctgtagtccaagaatgttggttctgagctctgaactaaggaatctgggagctgccaacccaaaaggttactccttatctatggagcataagtgaacccctggcccatttcttggnacaacatgtgcngggnaaccaaggcctttttttttaactaagggggaagggggnccggnnaaaggcccccaggaaaaagggggcccgggggg

SEQ ID NO: 487 - DNA, 436 bp, Homo sapiens
  misc_feature (1)...(436): n = A,T,C or G
gctgatctcgaactcctgagctcaagcgatcctcctgtcttggcctcccaaagtgctgggattacaggcgcgagccactgcaactggcccattaaatttttaaccccgtacttgacggatcagctgacactacccagaccagtaatctggctcaaccagtcctgcgatcccacccaggaacagaagacagcaagaaaacctcacttcaacactcccgtcgatgactccatcgacctcaggaagctccaaccaatcagcactccccacttcctgagcccctacccgccaaattatctttcaaaactcggatcccctaatgctcagcggagactgatttgagcaataataaaactctggtctcctgcaaaaaaaaaaagggccggggggccnattnannttgganttaaccnggntnaacttggttaaaagggggggg

SEQ ID NO: 488 - DNA, 90 bp, Homo sapiens
  misc_feature (1)...(90): n = A,T,C or G
tgccttcgccccctgtgaggcctcagaacattcgncnngctccagtcatggccacggcaagtgactgctgatttgcctaaccccacatgt

SEQ ID NO: 489 - DNA, 515 bp, Homo sapiens
  misc_feature (1)...(515): n = A,T,C or G
tacctaaaaaaataaatcctggccgggcatggtggctcacgcctgtaatcccagcactttgggaggccaaggcgggaggatcacgaggtcaagagattgagaccatcctggccaacatggtgaaactccgtctctactcaggaggctgaggcagaagaattgcttgaacctgggaggcagaggttgcagtgagccaagattgcaccactacactccagcctgggcaacagagtgagactccatctcaatcaatcaataaaatcaacatattaaatgtcaaaatacttaagtaaaaatgttctacttgttctatgtcactgaaagaatagtcataaaaatccagtatgaaagtttttaacagactactttatttacattctattacttgataagcagcacttgaataaccaaatttatattatcccagaaagttatggacactangtgcttcaagaagtttgctgaattaaangacagatttacttattggcttttggttaaaaattatgcaaaaa

SEQ ID NO: 490 - DNA, 528 bp, Homo sapiens
  misc_feature (1)...(528): n = A,T,C or G
ggtggagtctccgggaggatggctgtggaagaactgccaattccaagggcctggtcaggcagaggcattcttactattccaaaacaaggaaagggtaaaaccaagatgtcaaaggccccgctggtgtggaancaaatttctgcctccaccagctggatggctgctacccctgtacaggtccctaacactggaacagggatcaacccaagtgcttggggctcaccatgtcctcctccccagccaggacagcaagtggaagacacaggcgagctgaaagaggctcactgtgtgcccagccctaaccccctgcctcattggcaccaggcacccaggactcctcagaactcagagccagggtttgggcagcctcctcgtagtgctccttgaataggatttataggacttgcaccangagctttgggccattccaggggacattgcttttgggggaaaaaaaggacccaatatgggtatctaagaactttgaagcatgtcgtcagaaatcggagcttcanggaattgggaaat

SEQ ID NO: 491 - DNA, 537 bp, Homo sapiens
  misc_feature (1)...(537): n = A,T,C or G
gttctgattgatgcagaggctgttgaagtagaccacacgattaaagcaagagagggagatagaagtggagatggcggcaacctattatacctggatatatttggtatacaaacaaagagactcaatgatgaattgaacaatgaatctgaaggaaaaaggagaaagaaaacacaagtgtgcaggtgtcaattgtataccatcatagtaccatcaaaagaagtaggaaatagtggagatgaagcaggttgatatgatttggctgcttccccacccaaatcttaccttgacttgtagttcccataatccccacatgtggggggaggaagcctttangaggtgatttaatcatggggtggttacccgcatgctgttctcatgataatgagtgagttctcacaagatttaacgtctttanaaaggaactttttccccttttacttggcacttcttttttgctgttggcattgtgaaanaangacatggttgcttcttcctttcccccttgattggnaagttcccganaacctccccagcctt

SEQ ID NO: 492 - DNA, 367 bp, Homo sapiens
  misc_feature (1)...(367): n = A,T,C or G
gtgctgagttgaatactnggatgtggtcaactatactgttcttaccattgaaaaagaagtgctgaggccaggcatggtggctcacacctgtaatcccagcactttgggatgccgaggcagctggatcacttgtggtcaagagttcaagaccagattgggcgacntggggnaaccccgtctttactacaatccaaaattagccattgtggtggcacacgcctgtaatcccagctactcaggaggctgatgtgggagagctgaaccctggaggtggagattgcagtgagccaagatggcgctactgtgctccagcctgggcaacaaagcaacactatgttttaaataaataaatnagtgctgagatctc

SEQ ID NO: 493 - DNA, 189 bp, Homo sapiens
gtaaagatcatcttgttctgctgaaagtcaaaagcagcccctattgttgttttttaaataactctctaattaaaaccaaacaattctgtagactcttccataggaaatatattcatgaggctgatgcttatagaaagttttatcttgtgagttattaaataaaaatgcattcaaatttcaagaactgtt

SEQ ID NO: 494 - DNA, 157 bp, Homo sapiens
gtttatggatatgctgcctcttctgctaaactgtaaatctttgaagaccaggagccacgtcttacttatttgtgaatttccataacatctagtagagtgttttccacctaattgggcgcaataaatgtttattgaaaaaataaagaaggctatgggg

SEQ ID NO: 495 - DNA, 416 bp, Homo sapiens
  misc_feature (1)...(416): n = A,T,C or G
ccaagatggagtaacagagaccagattcatgcttctgcctgaaacaaccaaaacacagacagaacatatgaaacaatgtcttcaaaacactgaacatcagcgatggaagcaggaggcagagaaattctaggcagacaggggcgggtccccagtgaaacagcaccttcaagtcaaagtagcctgaaacctgctgcccaagaccctggactcagtcagtagaggagagaagcagcttgactggagagaagcaacttgacttcagagggacagctggacttcagaggaaagatagcttaacttcagagggacgctctgacttcagggaagattacctgaccatcccatcccccttttcagcttctntttttcacttggagacttcctttggttaaataaaataatctgcctccaccatc

SEQ ID NO: 496 - DNA, 395 bp, Homo sapiens
  misc_feature (1)...(395): n = A,T,C or G
atgtgaaaaactaagacacagagcagttaaaagatctaatgacagaactcagaatggaacacaggtctcctacttctagactcatgtttttgaggagatccgtggatcagcatctctcctggtcaggaccacagaggccttccacccgctgtgtgaagcctcgttggatgccagcttcaaaagcaaaaggtatgtcaatgttccataaagagaggatcgtgactctccccctgtgcaagtctggagctggagagcactctttctgtgggatgcagtcaccctgaaatgaaactctctttantagcttttacttgagaagatncccatatgccctacctacttatngtnatgcnctcttatattaaaaaaaaaagttggggagtttaaaaggacca

SEQ ID NO: 497 - DNA, 429 bp, Homo sapiens
  misc_feature (1)...(429): n = A,T,C or G
agatgaagtcttcctttgctgcccaggctggtctggaattccttgcttcaagcgatcctcccacctcgacttcctaaagaactgggattacaggcacaagcctgccccactctgcaacccggtgtagagaccgctacatcaaaagcacatagtaggagggaagaaaaaacccacagagttacaataatgaaagtctggaggcaaatagagtagaagtctacttgaataggtatccctccgtaggatagttcatcacatattagaactagaaaggtccttgaagtttatatagtggctgggctaatctgttagattttcaaagtccaccaagatcagttaaacaattgctgagctaaagaaaagaacttaccattcattggagtttntttgccatcccatgcagttattggaaataaatatttgtatgct

SEQ ID NO: 498 - DNA, 345 bp, Homo sapiens
acaaggcctctgcgaaccaggctggagtgcagggatctcggctcaatgcaacctctgcctcccacgctcaagcgattcccgtgcctcagcctgcagagtagctgggattacaggctgggattaccaccacgccctgctaatttctgcatttttagtaaagacagggtttcatcgtgttggccaggctggtctcgaactcctggcctcaggcgatctgcccgccttggcctcccaaagtgctgggattacacgtgtgagccactgtgcctggcctattcctgatgactctccttgctctgaagtctgtactgtctgaaattaatatagagactcctgctttctttt

SEQ ID NO: 499 - DNA, 388 bp, Homo sapiens
agagatcccccaagatgtaaaagttccaggttccaaaaaacctagaaccacccttaaggatggaccacgaggatctgacagccttttgcaaaggctcaccagccccgacctcagcagaggaaagacgactccatgcttggctagcaagggcaacggtgccaccagcttcatatgtcccacctggcagggggctcctaacaggggtcagagcagtactgtgacctgaagctctccctgctgcctcttcttcgtgccccttttttacccatcacagctatttcccctaatacatcttctgcatgtgcttcttggaggacctgagatgacactgagccagactgaatttttcttttttgccataatcagaatggattaattaagaattaaa

SEQ ID NO: 500 - DNA, 310 bp, Homo sapiens
gagaaagtcattattcacagaagatgcatgcgaaaccgcccttgcagaattacgactgagacgaccctgcacgtgatgcatcagctggcaccacccagatgcataaactggctcatctgatcttgtggcccccacccaggaactgactcagcacaagaagacagctttgactctctatgatttcatctctgaccaatcagcactcctggctcactggcttccccacacccaccaagttatccttaaaaactctgctccctgaatgtttggatagaacgatttgagtaataataaaactcaggtcttctgc

SEQ ID NO: 501 - DNA, 455 bp, Homo sapiens
  misc_feature (1)...(455): n = A,T,C or G
gaatcatgtttacaaagcattcccttggcaagaggctgtctataggatccagatggtctgaccccaagtcagatgtcctttataaccttgcttttatggtcctctgaccagcagcattaacatcaccctcacctgggagctcattaggaatgcagaatctcgggcctcatccctgatccactgaattggaatctgcatcttaacaagatcctcaggcaatctgtaagcatatgcatggttgagaagcactgctgtacaacactttgtaacaatctctcttgtccaagagcggggacgaagctagctgtgaaagctaacacaggtctcaggtgttcttcttcctgcaagtgagggtggagggtctgcattgngggtcattttcccgaataaccttccttgggatcganggctcctgtctgccaaaaagaagccagaatgaaatgatgctgtagaaa

SEQ ID NO: 502 - DNA, 397 bp, Homo sapiens
gtctccattgcttgcgatgatattaatgaaacagctgctgatcttattgaagttaccttgtgcatggagatggagtccctctctgtcacccaggcagaagtgcagtggcgcagtcttggctcagtgcaacctctgcctcctgggttcaacggattctcctgcctcaccctccttagtagctgggattacagcccgtctaatttttgtattttttagtagagaaggggggtttcaccatgttgaccaggctggtcttgaacccctgacctcaagtgaaccacctgccttggccttccaaagtgctgggattacaggctagagccactgtgcctggcctaaatttcatactataccgcatttaccctctatttaatataatacacccaattaagggttt

SEQ ID NO: 503 - DNA, 443 bp, Homo sapiens
  misc_feature (1)...(443): n = A,T,C or G
gtgagaaaataaagcccagagaggacaatcagcaaggaatccagcaccttggagccatggaaacccttcttggtgcctctttaggctcctcatggcagcaggggcaggagggcacacagggtgttgtgcacctagccccaggtggataagaacatccagatgcacctgcccttcactagctttgtcatggccctgcccccatcccagcttcagggtaaacccctgctaccttcagtgctcagccagtaggtcacttcctccaggaagtctgccatgaccaccaggttagttttgctctccttgttctgtgctcccatggctccaaaactgcaccacttctaaagatgcattcatctttggatctgatccctgggaagggatngaccagcattgtccatcantcttgagtccccaagcaccccacccaatgccagcacatagtg

SEQ ID NO: 504 - DNA, 346 bp, Homo sapiens
  misc_feature (1)...(346): n = A,T,C or G
acaaggtctctgcgaaccaggctggagtgcagggatctcggctcaatgcaacctctgcctcccacgctcaagcgattcccgtgcctcagcctgcagagtagctgggattacaggctgggattaccaccacgccctgctaatttctgcatttttagtaaagacagggtttcatcgtgttggccaggctggtctcgaactcctggcctcaggcgatctgcccgccttggcctcccaaagtgctgggattacacgtgtgagccactgtgcctggcctattcctgatgactctccttgctctgaagtctgnactgtctgaaattaatatagagactcctgctttcttttg

SEQ ID NO: 505 - DNA, 444 bp, Homo sapiens
  misc_feature (1)...(444): n = A,T,C or G
acaggaatgtcaaggcctctgagccgaagctaagccatcatatcccctgtgacctgcacgtacacatccagatggccggttcctgcctcaactgatgacattccaccacaaaagaagtgaaaatggcctgctcccgccttaactgatgacattgtcttgtgaaattccttctcctggctcattctggctcaaaagctcccctgctgagcaccttgtgacccccactctgcccaccagagaacaaaccccctttgactgtaattttcctttatccacccaaatcctataaaatggccccacccttatctcccttcgctgactctcttttcggactcagcccacctgcacccaggtgaaataaacagccatggtgctcacccaaaaaaaaaaaggccagcgaggccnatttagcttggacttaaccangctgaactttgtttaaaa

SEQ ID NO: 506 - DNA, 401 bp, Homo sapiens
  misc_feature (1)...(401): n = A,T,C or G
gtacacatccagattgccatttcctgccttaactgatgacattccaccacaaaagaagtgaaaatggcctgttcctgccttaactgaagacattgtcttgtgaaattccttctactggctcatcctggctcaaaagctcccctactgagcaccttgtgacccccactctcctgcccaccagagaacaacccccctttgactgtaattttcctttacctaccctaatcttataaaacagccccaccccatctctctttgctgactctctttcagactcagcctgtctgtctgcatccaggtgattaaaagctttattgctcacaaaaaaaaaaaggncngngnggncaattcagntnggacttaaccnggntgaacttgntnaaaaggggggggccacccaa

SEQ ID NO: 507 - DNA, 306 bp, Homo sapiens
aatgaaggagctggacttggagatctctctcacctctgaagttgtgtaagtgaagtatactgacccagtgtgaccacgctgctattcgaagacttactcaaagttttcaaacagactaaccatgtgggactgtgatttagcaaggaaaacagccagaataaacatgtcagtgtctccgttttatggtggcttcatgtgcagcattgtgacctatacctcggagtttttcttataccagatgaagcttgttctatagtcttcacaaggacataacacttgtcataagtaaatgtttctattctcttg

SEQ ID NO: 508 - DNA, 224 bp, Homo sapiens
gatgcagctgactgcaatcaactgagactgtggaatggtggattaggaaggactacagtatactgaagggtgagggtgaggacaagagaagggaaggtggtggagatgattattcaacagtcaagactctgctagtacacaagacaccagaaatccggaaggcctctccctgccccgccaaaacaggagaaaaaataaatttctgaaagattttgatatatttt

SEQ ID NO: 509 - DNA, 318 bp, Homo sapiens
gtggggtctttcaagggcagccttcgtctctcgctgacagacagcaagaaactgagcccctcagtccaagtccacaaagaattgaatgccgccaacaactatgcaaggatgtaaatgaactattcttcacttgagcctcggaagggaccataaccctgactgataactgataatagttttgtgagatcctgaaagcagaggatactcagactcctcattcacagaagctgtgagagaattcatgtatattgttttatgtctctaattttgtggtaatattgttatactttaatggctaataaagctaccaactcaccg

SEQ ID NO: 510 - DNA, 133 bp, Homo sapiens
  misc_feature (1)...(133): n = A,T,C or G
aactgacagggnncannggctcatgcctgtaatcccagnaatcccagcactttgggaggccaaggaaagaggatcattttgaagccgggatatggagaccaacctgggcaacaaagcaagacctcatctctac

SEQ ID NO: 511 - DNA, 114 bp, Homo sapiens
  misc_feature (1)...(114): n = A,T,C or G
gatcacgtcagatgttttttgnacccccnattncagncaccagnttgaagacccctacagaggntggggattggagaccaacctgggcaacaaaagcaagacctcatcttctac

SEQ ID NO: 512 - DNA, 409 bp, Homo sapiens
  misc_feature (1)...(409): n = A,T,C or G
atggagncttgctccgttgcccaggctggtgtgctgnggcgcaatcttggctcactgtaaccttcacctcccgggttncagctgattctcccaccttaacctcctgagtagctgagattacaccgcngttcaccaccatgcccagctaattttctgtatttttagtacnaaacgggttttcaccatgtttggccagactggtctcaaacttctgaccttaggnagatcntggnccaccttagccttccaaagtgctgggatcacagtccttgaagccaccgcgcctggncgacaacaggcttctttgaagaacaaggggccttctttaaattttnaacaaantctcttgcctttgttacacangagtatggggntncaataaattgtttggntnggatttgaaatttgc

SEQ ID NO: 513 - DNA, 411 bp, Homo sapiens
  misc_feature (1)...(411): n = A,T,C or G
actgaggcctctgagcccaagccttcacgtatacatccggatggcctgaggcaactgaaggaccacaaaagaagtgaaaanggccagttcctgccttaactgatgacattaccttgggacattcctcctcctggataatgnctctgganctccccaccaaacaccttgtgacccccactctgcccacaanagcacaaccccctttaactgtaattttccactacctacccaaatcctataaaactgccccacccccatttccctttgctgactctnttttcggactcaacccacttgcacccaagngaaataaacaagccttgttgctcacanaaaataaaaaaaaangncaanaggngncctncnnnntgnnaatnaancatgggtnnngttntgtnaaaaggggggggg

SEQ ID NO: 514 - DNA, 165 bp, Homo sapiens
atcaatggttctcagtgtgatctgcagagcagcagcagcaatagcagcaacatctgttcctataggttgcactgtggagcaaatataccaggaggtcttgatttcctttttctccctcaccatccgataataaatccaagtggaatgctaggaattggtaaaaag

SEQ ID NO: 515 - DNA, 461 bp, Homo sapiens
  misc_feature (1)...(461): n = A,T,C or G
caatgatgttcagttccaattttccaactccccagaagatgctccactgctccactctcttgccaccatggtcattccaagaaacaaatctgaccacagcacttctccccccacacccttcccaacacagcatggactctgcaacctggtatgaggggcctctgcttcactccagtcagtcccatggctcccaaagtgtggtctatggactcctaggggtctacaagatccttccagaggttttacgaggtcaaaagtatttgataaaaatactaagacatttcttggctgggagccatggttcatgcctgtaatctcagtgctttgggaggctgaggtgggagggttgcctgaggccaagagctcaagacaagcctgggcaacatagaaagaccctgtctctacaaaaaaaaaaaggccagngnggccaattcagntngnacttanccaggctgaacttg

SEQ ID NO: 516 - DNA, 475 bp, Homo sapiens
gtaacccacagcctcatcctggggaagcgagaaatggtaacacataactggccaccgtccaagctccttagaatagaagttcatgggaggaagcatccacatgtgcactcacatcttcagaacgctgcgcctcctgcccccaaacacactgacctctgccttttcaaaggcaaaatttgatccattaatgttccccagtgttggtttcataaagcgtttggatgggcccttcttcacaaatgaataaaaatgagtaaagtcctcagaatcaaaggaaagccaggactggcttccagaagcacgaggcaacccagagagtccatctgcagccaaaccatgcaacagacccagccacagcttagaggctggcaacaagtctgcctgcaggatctgccaaggaaccagatgctgttgcttccaaagcttggcatcagggcccctgattgccattcaacaaagaggaaaaataggggat

SEQ ID NO: 517 - DNA, 371 bp, Homo sapiens
gaaacaagttctagttggaatgggaagctcattcaacaaccaggcatcatccgcccaccaggatctcatgctcctaaggcaccggctcactccaggagactgagatggctgaaaatgaagaacagggaaacttggacccagagacatactcagaggaagaacgctgtgtgaaggcggaggcagaggtcaaggggattcatctatgagccacagactgccacagactgccagccaaccctcaccagagccaggagagaggcacagggcagagtctacctcatacccctcagaaggagtcaacggtgctgataccttgatttctgacctttaccttcagaactgtgagacaataaatttctattgtgtaagcc

SEQ ID NO: 518 - DNA, 216 bp, Homo sapiens
ctacagagctgcatctgaaacactggctctagcatcccctatgagcccaactgcagagaagggggctgtagcccttgaagccatgtgaaataagacctgaagtaaccgcgatgccagtgtttggccacccttggctgaaataacatatttacccagcaacaaagctttcccatccatttttatttaagagagattttaaataaaatctagtaaatg

SEQ ID NO: 519 - DNA, 483 bp, Homo sapiens
accagtttgaagcagaagaatgtcctgataatggcatagagccaaagcgattccatcctctggacatgagctgtgtggtgtccccgtcctcatacctattccagaaccacactggtccctgctctcgtctccgaactgtcggaggacggacctgcttttgcaaggacctgaactccctgtgttgttgcttaagatttttacccaggcatgaaaaggaaatgaattctgccaactcatcgctgtgtctgtgggaacagaaactcagggcacctattctctgcaagaaaagcatcaattccctgtaagaaaagtttcccacctgagacaatgacacagaccaacataaatgctcttttggttttatgatttctgatattagattttacttgatttttttaattttaattttttaaatttcgttttgagagttaaaagtgttacttcttttatttccagcagttcaaggaatttcagagcaatctt

SEQ ID NO: 520 - DNA, 233 bp, Homo sapiens
ggaaaacacaacacctcatgcagtgaaggactgaagctcctcttgggctggtattcctgaggcagaacacaggtccctcaccccgatgcccacgaccactcagtaacaacatctaccaccattcggaggcaagacaaactgcatgagtaacccagcacagccactcagatgtcacttcttcctggtgaagaagcagaaccctagattcacaaaataaacagtcatctacaggc

SEQ ID NO: 521 - DNA, 366 bp, Homo sapiens
ggtgggggaatggagtctcactctgctgtctaggatggagtgcggtggtgcaatcttggctcactgggacctccgcctcctgggttcaagcgattctcctgcctcagcctcccgagtagctgggattacaggtgcccgccaccatgcctggctagttttggtatatttagtagagatggaatttcaccatgttggcaaagctgatctcgaactcctgacctctcaggtaatctgcccgtctcagccttccaaagtgctgggattataggcgtgagccactgcgcccggcctatcattgctgtatttcaagtacctgtttaccttgtagggtctgccctaccaaattaaaagctttaaaggatggac

SEQ ID NO: 522 - DNA, 368 bp, Homo sapiens
acaaccctctcacagagcacagagcgcttcacctatgctgctgcccggaatccgaagaatgtggagaaacagagcctgcctccacctcttcccagctgtgggggaccataataatacaacttcctcctccccaggcttcccagcacccacagacaacgcgcaaaacacaatttaaggtggaccgactttacaaaaggcaggcacgcctacgcgatgagcactggatctaagcagaaacgcagagccgcccaagccaggtccatcctggccccgctctgcacctcatgccatgatgtaccgcacaggccttctgagggggttcaaatcccatgtcaacaaaaggaaaaattaaaggcactctaatcggt

SEQ ID NO: 523 - DNA, 487 bp, Homo sapiens
  misc_feature (1)...(487): n = A,T,C or G
ggagcagtgcatactcttgttgtgggatgagtgatgaaatcacaccacgggtgcccattccaggcaggttgaattgccccgggcctacagaaaacctgacctcctacaagacagagacaccaaatgcccaccgatggacaagcagaggaccaaggggttcctggtgttcatcgtgcaggaaacactgcaaacagctggggagatgggaatacttgacaaccacctttcacgtccagagatgaccaactaggaactgtcctcccccatcacccacaccccagcacagtgattactcagccaaatgcctgcagggccagcaggtaacacccatgactgaaggtggcggggcaaatattacaacagggagaggtggaacaaatttgggctcgtatgccctagataagaggatgaccaccgcccaattccaactgggaaagcaggccccgtgttgccagaccttnagaatttttcagaaaaactggaaatt

SEQ ID NO: 524 - DNA, 325 bp, Homo sapiens
  misc_feature (1)...(325): n = A,T,C or G
gggctattacctttngncccncnaagtggaaaaagnggnaagggggggggaaaatggtgggagccctnganaacagaccacttcaccaagagggcccaaggtgattngtaaaaagaagaccattncnncattccttcattctggacccattctaccaaagcctcaagaaagaagaaggggcctgggaaacaagcttccttttcccttcaccaagccttcaagaaagggaaattcaaactnttgnccccccattncttcatcttggggaactttcccaattttcttggaactttgggagaaaaaataaaattttcttggttatttt

SEQ ID NO: 525 - DNA, 495 bp, Homo sapiens
  misc_feature (1)...(495): n = A,T,C or G
attcatagccnatgatgattaattggagatgggatttttgaaaaccttcctagccacttagctaagggacagctttcccctaacactctcgtgattggtgtgaaaatgaaacctgctctttccagaacaatgagaatgctacctctgccgacaacattcccatccaactaagatcaagccagattgctcttgagtcattggttagtaacccatgggaagaggaagagtagctgcagttgacctataaactctgccttggccttgtcccaagctaatccctattacatcccacagactgtccctggagtcagaagttgtccccagacttgtcctaatggcctagcacagtgggaagttgtccaagaagtcatggtcatcaaagagaccttcagagaccacttaattgtacaagactttatttgncaactnctaaaantnctgagtgccatgggacaaggcaaggaagatgtanttgctgggcaagaaaagggagca

SEQ ID NO: 526 - DNA, 355 bp, Homo sapiens
  misc_feature (1)...(355): n = A,T,C or G
gaataaaganccttttnnactcnctaagtgaccgggattgaacccnacatcaagaaattggagcnaagttactttgtggnttaacaaagcattaggaaatgggactctcaagctctctcaaaaagtatcaaagaagtgaaattcatcagaccactgtgtcgagacaatgagacgccagatgccagattccttatttgtcatgattgcttccttagccctccctagttcctgttttcctgctcataagttacatttcttccttgctatataatcccctaatttcggctggttgaggagatggaattgagactgatatcccatatccttaactgtagcatgcaattaaagccttctt

SEQ ID NO: 527 - DNA, 521 bp, Homo sapiens
  misc_feature (1)...(521): n = A,T,C or G
ccatctgcaaccagagttgagctgtgaaactgcagtcagagaggagggtatggcttagtgcaaatgtggaagtctcagtcatacagaagaaaatgaaaagcctgttcttcctcttcacaggattgtgagaagcagggatcttgaggtctcaaatgccctattggaggtcaggctctggagattccaagatgaccacacaatccctcctccgtggaattcacagttctgagacaagacagagaccaagcagctccaagccggcccctctgtttataaaaccaagttccgggccaagtgtggtggctcacgcccgtaatcccagcactttgggaggccgaggtggccggattacctgaggtcacatgttcaagatcatcctgggcaatgtggtgaaaccccatctctactaaaaatacaaaaantaactgggcgccggggtgcatgccttttgatgccagctactcgggaagtctgaaggcaaggaagaatcgcnttgaaccccgggaagtggaaggttgcaa

SEQ ID NO: 528 - DNA, 510 bp, Homo sapiens
  misc_feature (1)...(510): n = A,T,C or G
ngntctnctaagactacaagggaacactgcgactttccctgaggctttgggttactgggaagatgaggaaggataaatgtgaagttgtggactgttttaaattccacctgaccattctgctttcctgagcaacctacccacgccaatttagtactggctttcttcagagcattaggacaatgggattctgtctacagctgtgccatgaacggactctgattccttaggcaaagaatctcttcttgctaaaatagttaatttgaaggaataacaggaatatataaaataatgtctcaaagtgttttggtcacctggtaaagaactagatttcacatgaatgcaacataatcagtactatccttagctattgatgacatatctaaatgggacattcngggcattgtccggagcatgctgacagaagcattatattttcttaagaaaacttaatggngccctcatttgaccactttttancatgttccaaaccttccanacattgggatttaa

SEQ ID NO: 529 - DNA, 504 bp, Homo sapiens
  misc_feature (1)...(504): n = A,T,C or G
agaaccctgactaatacaaatgtggaaggactagactggcttagtcttcaggcctacatctttctcccgtgctggataattcccgcccttgaacatcatactccaagttcttcagctctgggactcagacctgcaaccaccgactgtaggctgcactgtcagcttccctacttttgaggttttgggactcagactggcttccttgctcctcagcttgcagctggccttttgtgggacttcaccttgtgtcgtttgctgaagcacatggctgaaacgctttcccaaagagttgtgccagtttctactccaaacagcattagagaggaatctggacctgctgcctccaaagttgcctctggttctgaaattttatggctacgattctatcacaaaattcacaacgatgctggaagtggttctgctgtgaccaaanggggaggtnaatcatcgtaaccccaaaaggatgcataatggaantatcataaggatttgaaatatgtccta

SEQ ID NO: 530 - DNA, 513 bp, Homo sapiens
  misc_feature (1)...(513): n = A,T,C or G
gcacaaaggaagactacatttcccagtctgattgtatctatgtggggctatgctaccagttctggcaaatggactatgtaccagcagcacgatataccacttcatgcctagcacctacaatctgcaagacagcatctgcattctcctctctgtctactgtaggattatcagtgtccagcaaaaccaggacattcaccaacatattttgtcaaatgacacagcaagaaggcccttaccagatgccagtcctttggtcttggacttcccagcctccagaatggatctgagtctttgttttctgctcaacaagctgctgagcagcaatcccagccccagggcccagagcaccttcctctgggagtccagcctcangactgtgctctgcctgcccctactgcacangcctcaaaaccacccacctcaacttctgggtcaagcacagtcaagaagcaaggtaagangctgngcttcactggatgaactctatgaatctgcnttttcgtttcaagctgt

SEQ ID NO: 531 - DNA, 501 bp, Homo sapiens
  misc_feature (1)...(501): n = A,T,C or G
tcttccctaaaggcttgatcaattcagcttacttaatcacaaaactgtaacgacagaatatttgcaagacctattcaagaagtcttcacaaatatgaaaatctctctccttcattacgtgaaaaagacacttgcacatgcatgtttatagcagcacagttcacaattgcaaaaatatggaaccagcctaaatgcccatcagccaacaagtggataaagaaaatgtagtatacattcaccatggaatactactcagccataaaaaggaataaaataatggcatgtgcagcaacctggatggagttggagaccactattctaagtgaagtaactcaggaatggaaacccaaatatcatatgggagctaagctatgaggatgcaaagggataagaacggtataatgaaccttggggacttaaaanggaaggatgggaaaggatgaaggataaaaaacttcncattggctncagtgtacactgntcgggtgccaccaaatcttca

SEQ ID NO: 532 - DNA, 500 bp, Homo sapiens
  misc_feature (1)...(500): n = A,T,C or G
ggtctactgcatagaaaacattcaaaaatatttgtagagtaaatgagcaagtgtcaaatacatgaatgaattgcatggcacatagtacttaacaggaaagagacagaaaagcgttgatatgaagaatttctaaaatcctcatatgaaatgagtaaaattaaggataaatgacactggaaaaccaaaatggcttccatatctttccaaatgctgctgctgatttgttcacatagaagcctattcatcatcctgcaagatgaagttggatatctttcaccgtctttttgaagtcatcatcagttttcctctcctacccccaggcatgagttttgtatcacttacatttatgctccacaatgggaatattgatttggcccaaataaagacattcaacaaattcttaatgagtggatcaatggaagattnctgccaaccaaaatccanggnaatccttgagttgcacagtggantggcattctctttggattcattttcctaat

SEQ ID NO: 533 - DNA, 375 bp, Homo sapiens
  misc_feature (1)...(375): n = A,T,C or G
actttgcccaccattngaatccctagtacctgtaataacngactggcttggagttggcagccaacaaaaatttgtcgaacggatgaacgaaatgaaggaacgtgagaggtacacaggaaccacaatcatataaggcaaaacttgccatgtttggagtggagcagagcttggaaggcccgtacaaataagggcatgtaacacccttccagacagcaaggattttaaatggangatccctaaatggccccgaaagaacttcacccttggntaggaaggcttcaaccatttcccccacccttaacctttttttaaaaggantacaaaccaaattccaaaaacttttaccaaaaccttngnaaattttcttaagccttg

SEQ ID NO: 534 - DNA, 599 bp, Homo sapiens
  misc_feature (1)...(599): n = A,T,C or G
atcatgnaaactagnaggatttcgggaccattcaagcaaaaccaccattggaaaaaggttcgtgcaccacanatnggtggtttttaaaaccaccaaggaaattgggggtgttggaaaattggaaaagnaagccaaaggggcctttttattttggaaaattggaaggggaaaaaccaaggtnggaaggccttcccgcggggattttaattccgganaaaagnggggtccaccttggggattttggcccttggcccaccaaggggttttttttggggaagaccttggtcttttttcccttaagnaccaattcccaccccggggaatttngggggaagaccaaaaaaaatagnttggnttggccaatttttgggaccaaaaaccggtttaacctttccaagggaaaaggaaattttaattgggtttttgcccccaacccccaattnaatttgggaatttttnaattccnaaaggnccnccaaccccaaattggggccctttttaanttcccccccctttgggttgcccaanaaggggaaaattgggaaattttttaaattttttccccccaatttaaaagggtntncccccaacccaaaagg

SEQ ID NO: 535 - DNA, 381 bp, Homo sapiens
  misc_feature (1)...(381): n = A,T,C or G
agactaccctagcattaagntncaagnaactaggagnctngcctngcaagaccaaagncccccttgccaccattggaaaggaaagcccccattccttggttggggttagnggaaggaaggaaggttggatggccccaaccaccaccacgnaaggaaaaaaaaggaaaaaccggaaggaaggaaggaaanaaggccacggaaggaaggaccacgcaaggaccagnaaggaaggaaggccggaaggccattttcttggaaaagggcgccaaggccttccccccttttctcccccttggttggccttttccccaagaggttccccttggttggccttttggccccaaaattaaaaaaccttggcccccttttttttttcttttc

SEQ ID NO: 536 - DNA, 630 bp, Homo sapiens
  misc_feature (1)...(630): n = A,T,C or G
ctgggggggggagncttaccctggcatttaaaggtgcanggaactggnaggataatnaaatggaaaggattcttgggnaaccttggaaaggatagcccattttccattaccaaggcnccattcctttaaaccccctnaaaaaaggggaaaaaaggcctnttttggaaaggggggcccanattggaccaggaagggattaaccatnaagnaaaagttttggggaaaattcttgccaaattggaaaagccttggggattttttaagggaagnggcgttttaccccccacacctnggaaaaggtttaaaaggggattttaaccttttggggccttggcccattaaggccaattaaaaccaaaattggaaaaggtggaccttggaaaaaaaaattcccaagcaaaattttttccaagggaattaaaattcttaattctttaacctttttaaaaaaccaatnggttttttaaaaaaggttaattgggttttttttgggtgtttttttgggccaaggnaaccttttttttttttggccaatttaaccctttttaaattttttttcctttaacccaatttggggggngtttttnaaaaaaaatttcccgggaacccttngggttttttttttttttt

SEQ ID NO: 537 - DNA, 258 bp, Homo sapiens
agtgcctgttcctgcctgctcggtgactgagctgatctctctaggaatgacctgtgtgctgatcaagccgacacgtctctttgcttcccgacgtcctgatatggcagcaaagggtggtagaatgaagtcattcctgcaaaagaagctgtgagaggaaatacagatgcagtggctgaatatgaaagtgcttatgttcccaaaggaagaaaatgctaaatctcaattagaggttggaagaaataatgacgcagtcttttt

SEQ ID NO: 538 - DNA, 758 bp, Homo sapiens
  misc_feature (1)...(758): n = A,T,C or G
ggacgttcttgggggggaagcctacccttggccatttaaaaggttcaagnaaaaccttggaaggaaattccttttttggttaaaaaaaaaatgggggaagggaaaaggaccccaattcccatttttccttccaaaccaattttgggaaaaccccaattttgggggatttncccacaatttaagggaaaaaaaatttggtttanaaaagggggccccacaaggaaccccccncgggggaattataagggggaaaagggggaaaattttttttcntttcccctttnggaccccncgccccnaaaaaaggaaacctggggagttcntttttcggcctttngttgcccaaaggncccaanccttggggganaaanaaaaattggggggacccgnttaacccttttttttggttgctttggaaccctttacccaaacccaattttttctanaagggaaaangggaagggggtgnccccncccttcctttttccatttccaaattgggtggggggttggggaagggaaanatttttccaatttgggggggggggggggggggcccttttccngnaaaaaaaaaattgnggaaaagggaaaaaaggtnccntttttaatttgggcccccnctttttgggcncccccccaaaaaaaaaaggnaaaaaattaaatttgggncccnnttttttnccnccgggaaaaaaaagggnaaaaaaggnaaattttaaannngcccttngggggcctttggtttcccccttggg

SEQ ID NO: 539 - DNA, 240 bp, Homo sapiens
  misc_feature (1)...(240): n = A,T,C or G
gatatgatgggtgaaattctagaatccaccctggaccatgaagactctggactatactctcaggatggcagagcagtgagctggaaggagtctggctccttgagaaggatggagcccccacaccacaagtcccggactgnctgctttactattcagccttaacaaagaaggaaatcctgccattggcaacaatgtggatgaacctggaggacactgtgctaaataaaataagccaaacac

SEQ ID NO: 540 - DNA, 516 bp, Homo sapiens
  misc_feature (1)...(516): n = A,T,C or G
aggttncagaaactggaagngnctctctcncacctncaantggcnnggnannncnagaagggggaaattncannacacaagaactctcgctggttgggatcttcagaaatcgttctccttggntcntcaaacgcnaggactactatgctcgccacccatccaaatcgcttgcgcgtaagagggtaatttcctagagcgtaagctnanccattnancattggctacacaccacaaancgccacccggnggggtgatanaattttttggncaattaanattggacttngggnaggaatgnncanctagctcttttacaattaaaaattggttttaggacctccaaatgggcgtgaaagtaaatatanaaaaacgttggccttgggggggcatactaaaaaatttgccctttcgcaatctcataggaagactatcgagcccccntntacgcaagnaactnttngcaaangggncaatttaaagacaccaacggcgacccaattttgggaaggccccctc

SEQ ID NO: 541 - DNA, 271 bp, Homo sapiens
ccaagaagccttaattaacatctgttaagaactagaagatgcatcccactctttactttttattcctaattctcatccataactgaaaaggttaacatttcaaatgggattacagaatagtgatgtcactttcctatattcatataccaagtcaatgtttaaaaatagcttatgttcaggagaatggcgtgaacccgggaggtggagcttgcagtgagctgagatcgcaccactgcactccagcctgggcgacagagcgagactccatctc

SEQ ID NO: 542 - DNA, 331 bp, Homo sapiens
ctggtttgccatcccccggtcagcatgaacaacagtaaccatcttgtaaacagtggcaatgtgggctatgcatcttacctgcttgagcaagagaagaacaaaggatatctacctggacaggtgagaatttatatcattgaaagcttcatcttgattcactgagtgtcatcattcatgctgcattcagaagaggtgattcaaatctccagaataaagtgtcatcatcaatctcacatattggtatgctcgaatagacagcatttaccatcctccctaatgtggaaagaaaaataaaaaatgagtactaaccatttgctttttgtgttaaaaa

SEQ ID NO: 543 - DNA, 111 bp, Homo sapiens
gaccatctttaatcaaactgaattaactggcctgtgcagactgtctttatcctctaagattcagggatactggcctgtgagtttcagcaccgactttctggaactgtaaag

SEQ ID NO: 544 - DNA, 378 bp, Homo sapiens
  misc_feature (1)...(378): n = A,T,C or G
ccaattacttctgactttcaagactcttgtatttcactggcttagggaaaatcaagctaagccctaagtgatggttggatcatccatccagttctttgcttcctctagctgatatccttctttgctgtactatatgggaaaagcaagaaatattgtgacaccaaaagggaggagttttgctcttgtgtgtccagctggagtngcaatgggcngcngatactcagnntcacntgcaaccttctgcctccctggggtttcaagtgatttctcctgccttaccctccctgnagttaagcctgggggaattaacaggggccacccttgcccacccaccgccccccgggctttaaatttttttttggcaatttttttttaaga

SEQ ID NO: 545 - DNA, 110 bp, Homo sapiens
ggccctgggagagtgggttgagagaatggaagtgaagaggaaggcttcaccatcaccttaactaacatgtgtttcctaccgttaaataaacattataggaggcgcattat

SEQ ID NO: 546 - DNA, 70 bp, Homo sapiens
gtatattagttcttatatgaatgacacgaagaaacaatgaaattgaaggaaaggaagatgaacgctaagg

SEQ ID NO: 547 - DNA, 181 bp, Homo sapiens
agagcagagaaggggagaagagaagcatgcagctgaacaccggagagaagtttgactccagagggatggcttgatggtgggacttcaggagaagaataccttcctgctccatcccctttccagctccccttcccactgagagccacttccattggcaataaaatcctcctcagtaaccacc

SEQ ID NO: 548 - DNA, 342 bp, Homo sapiens
  misc_feature (1)...(342): n = A,T,C or G
tcccacagccctgtgaccaaaagactgggagtgtatgtcaggcctctgagaccaagccaagccatcgcatcccccgtgacttgcacgtataccgcccagatggcctgaagtaactgaagaatcacaaaataagtgaatatgccctgccccaccttaactgatgacattccaccacaaaagaagtgtaaatggccagtccttgccttagctgatgacattatcttgtgagagtccttttcctgggcttcatcctggctcaaaaaagcacccccactggagcatctttgcganccccacttctggcccgncaganaacaaaccccccttttgactggaaatttc

SEQ ID NO: 549 - DNA, 267 bp, Homo sapiens
  misc_feature (1)...(267): n = A,T,C or G
aaaccaatttggcccggttggcccctttacccaaaaaaaaacccgggggaaaagggtttaaaaaaagggaaccttttaaaaaggcctttgggaattttccccccaacccgggaaaaaaaggcccaaggttccaaaaggnaattggcccaaggggggggaaanggcaaaaggnggttgantttttggggaagnaaaaacccttttaacccgcaaccttgggccccccctttggcccaaaaaaaaattaattnggtttcccccttcggg

SEQ ID NO: 550 - DNA, 331 bp, Homo sapiens
agtttcgctcttgttgcccaggctggagtgcaatggcaccatctcggctcaccacaacctccacctccccagttcaagcgattctcctcccttagtagagatggggtttcaccatgttggacaggcttgtctcaaactcctgacctcatgatccgcctgcctcggcctcccaaagtgctgggattacaggcatgagccaccatgccccgcctatctagcaccttttaaaagtctgaatgggaaacatttgccacctattgcctctaagggtggccacctatgagacttcatctacattaataaaactacatacaatttatctacataataa

SEQ ID NO: 551 - DNA, 330 bp, Homo sapiens
gaaatccctgaaaaaccagatggcacaagttactcagaagaaatgaaaggattttccattattcaaataggaggtggaagaggaagtgtgggagtaattactggattaagatcactgaaagacaagattgtctttaaggaaacagaagactgagaagaaaagaagcttgctcaaggtcacatagagctggaatttaaattcagatctattatactcttaaggactgtggaaggcttttagagcaaaatctgatccagagactgtggatgctggaggagccgtcaaggctggggaaagtaaacatgcacttgtgttcgcaatcaacagaaa

SEQ ID NO: 552 - DNA, 330 bp, Homo sapiens
tggttttgccgttgttactgctcacctggtttgattcagtggcgtcgcggttggtctctgctacagtccattactcacagtgccagcacatgtttccttaaaaagcttcatcaccatcctcctgcaatgcgaccttcaccggctccccgttgcctgcccaggaggataaagtccaagttctcctgtggaaagaagacccttcacacgctagtcccagcctgtcttcagcccagcccgctgtgtttcctttcctgccttatcctaagacatccttacctttcaatcacactcacttttccgaagcatttttgaaggtattgagggagttct

SEQ ID NO: 553 - DNA, 338 bp, Homo sapiens
  misc_feature (1)...(338): n = A,T,C or G
cttaaataagtggatctctggataagcggcctgactgatgagagaaagagctggcttttcttccgacaatagttgttgtgacctctttgcggcaagaacagtgatagaacagacattatcatcaggagaatcagctcgtaaaagccacnttcttggcacatcaaaggaaaacctggactttgaattctctgtgtgatcccaagtaccagaacagccgcccagcaggggctctggaaatgtgccctgaaagaactcagacaacaggagaccctccttcagcttncagggcttgctggccatttgcacacagaagggagcagccttgtggtttcaaaggg

SEQ ID NO: 554 - DNA, 237 bp, Homo sapiens
gaagctgtcaaaaatgtttgaaagtcactgcacaaaagaagagtcaccactggtcagttttgcagtactggctaaagcattcagatgccccaagagtcaaaaacacaataacgaaatagtgagactccgactcaaacaacaacaacaacaacaactctcatctttttgcctataaggaattattcttggcctctgttgtacaacttcaagtaaaaggacctaacctacttagaaggg

SEQ ID NO: 555 - DNA, 331 bp, Homo sapiens
  misc_feature (1)...(331): n = A,T,C or G
tcagctacggtgaagctatctaaaccggtggctctatggacccagcaggatgtctgcaagtggttgaagaaacattgtccgaatcagtatcagatctacagtgagtcattcaaacagcatgacataactgggcgagccctgctgagacttactgacaaaaagctcgagcgaatggggattgcccaggagaacctccggcagcacatcttacaacaggtgctccagctgaaggtgcgagaagaagtcagaaatctacagttactcacacaagcattattctgaggggttcttccattaaacaccggntagccnttccaagctgcttgtcctg

SEQ ID NO: 556 - DNA, 218 bp, Homo sapiens
ctccgcccagggagatggagacagagggccaaagagcaggagatccgctggacactcgccgaagagcgggagatcgctggacactcgccgttggcatcatgtggggtgctccatggcttccaattggccaaattcttttcagtgttaaaatgctgtaaaatataaaacgtatgtaatttcttgacaaaaaataatactatttcaggtttgactctttt

SEQ ID NO: 557 - DNA, 330 bp, Homo sapiens
  misc_feature (1)...(330): n = A,T,C or G
gccaaagaacanggaggaagactgagaaagaacgtgaaggccatctctttcccacaggcccttcgcaggaggctccggactgctccccgcactgcgagatgcctctgtgagccgaggagctgtaaaacacgcagcgggcggcacatgggatgccggatgccaagctgtgtgcatgggacagactgagcaacccaaaggagcctgctgtcccatcaagcacgtggcagtcggggcatcccatggacaatggaaccgtgcattgtgagtccatgtgatgaaccagcgcatcgggagccacntgggtccttcccttcacccgtcatcagtcag

SEQ ID NO: 558 - DNA, 172 bp, Homo sapiens
gtggcctcagacagaatgacaggcaccagtcccggacaggacacgcacaacacaaaagctatgggaggtagaatcaaaagtaccagagcccaagagccgtggaagatggctctccgattgccttcagacaagcacccttacctgaatgcttgcagaataaacagactgcctg

SEQ ID NO: 559 - DNA, 336 bp, Homo sapiens
aggagaatacaacgtttgagatggatgagtaatctgctgaagatcactgaatgaatgtgcaaggaaaccataacataaatccatgtctctttctactactcaattttttcctgttactaatatcatttttaaaaataatatttatggggttacaatttatgtttaataagctttacccattttaccacgttatgacccaacaagaaagccttcaccagatgcggccacttgatgttgaacttcccagcctctagaaccacaaggtcagcataatatttttcaaactcatgcatgctcctgcatatatcaatagcctcatttggtttttattgcatg

SEQ ID NO: 560 - DNA, 332 bp, Homo sapiens
ccaacttcaggactgattgatcatgacttctataaaggagcaggcagcaattagcaggctcttaagttttttacaggagtgggacaacgctggcaaagtcgcaaggagtcacatcctcgacaagttcattgaaaccaaccaaggcaagactgcccctgaactggagcaggagttttcccagggagccagtttgttcctggtacgcttgaccacctcgcttagaatcactgacttacacctatggtcccagctgcttgggaggctgaggagggaggatcacttgggccttggagtttgaagcttgcagtgagctatgatcacaccgctgtgta

SEQ ID NO: 561 - DNA, 62 bp, Homo sapiens
aaatcatgcccaagttcaaacaacgaagacggaagctaaaagccaaagccgaaagattattc

SEQ ID NO: 562 - DNA, 332 bp, Homo sapiens
accagctagaggtttatcaattttgggacgtgcctccatctcatctcctcagactcggtgtttcaacaatggctttgctcctcagtcacctctctctggaaggatccctcaatggatgagtacacctgcctctggatggcacatgaagcgtgggggcagaatcaatccacattgctgtctgaatgtagtaccactgctagaagcaggtcaatcaacaaccaggcctacaggaggagggaggaagaagagaggctgctctatgtcctccttttgccccttcccacacacagtaagatgaagatctctttccttgcacccctcagtctcctttg

SEQ ID NO: 563 - DNA, 308 bp, Homo sapiens
  misc_feature (1)...(308): n = A,T,C or G
gaggcagctctcctccagtgcggccttggaaggagatcctacggctgccaccaggcgcatcgcattccctcctctccatncttgatgccagagtcttcccgggtgtgatctgcttatcacncgtcccctctgaggacagctctgaagaccagcttccttgacttgcactgtgagaccagtggctggtctgtttccgttgagtnggggngccctctttgactngaccacantttccttgggcccatttctttttccccttccccctttgaagaaagtctacttggncctnnggggggcagggggggtta

SEQ ID NO: 564 - DNA, 354 bp, Homo sapiens
  misc_feature (1)...(354): n = A,T,C or G
agccagccccacctcccagcctcctcggcaatcagcgtggccgtgcgcctgagttctagccaatgggagaaagtgaaggactccagagcccctggagatggaggatggaggagcctgggttcttgnatcctcacatggaatgccagccacaaattggcatttggactcctatatggacaaggaataaatttaaatcctattaaggctgggtgcagtggctcatggctgtaatcctactgcccttagaagaccaaaagcagggaagatcacttgaggcccaggagtttcaaaaaccaagccttggaccaacattaagtgagaccccgtctctacctaaataaataaataaatcta

SEQ ID NO: 565 - DNA, 350 bp, Homo sapiens
  misc_feature (1)...(350): n = A,T,C or G
ctccaggactctacctctcatcaaggctgaccacgaagcaagatgatggaagccaagagagctcctctgcatgctccactgtctaagctctgctctgcatctgccgtgattcttcttccaaacagaaaacaccgtctttctttttgactacatctgtcctcagagatggtgctgatggatccatttataatttatgtgaatttaaacctttgcaatttttacatggaataaaaggacctattttntggaaagaaaatgctgaacaagagctganaacctgggggccatcttaangcagggggttccttccttacacccctgctgtcanaaagccanctggttggccattt

SEQ ID NO: 566 - DNA, 193 bp, Homo sapiens
  misc_feature (1)...(193): n = A,T,C or G
taccacttccgctgtcacggtaaagtccgccatcagcaagactgaaggagttgaaagaccattnanacgctcctttactctttnagacataagtgtntcnattgntaatnaanttntttttccaggccccnccccgngttcattnttgcaaaatggactgngcctcngacntcctcnnaaaatgttcaacctt

SEQ ID NO: 567 - DNA, 310 bp, Homo sapiens
tttttcgctgtcttcccacctactggttatgtctgattcagttccagcgaccttgaagttggaaggaaagcctctgcccttcagacttcttcatccctgagttgagtttcatggaaaagcagcctctgggagtaacaagtacagatgcagtttcaccatgttagccaggatggtcttgatctcctgaccttgtgatccacctgcctcggcctcccagagttctgagatgacaggtgtgagccactgcacctggccaataattttatttttaaacatgtaagattctatctctgaataattagttaaacct

SEQ ID NO: 568 - DNA, 317 bp, Homo sapiens
  misc_feature (1)...(317): n = A,T,C or G
gatatatgggacacctgcaccggcattggatttggccccgcaacatcttaaagtgccaaaacactatctccaaggcaaatggattccccaggcagatgagaagatcacattactcatgttcaaaatattaccccagttgcacaagtattgtggaattttgtgcattngnnggnagacaactggttctttatcttcttccaatgtcaaaagtaaatttggtgattataactttggcaatatattttaagcagaattagtatattatgtaacatgttttatgaacatnccttattaaaattttgggttatggactcctt

SEQ ID NO: 569 - DNA, 338 bp, Homo sapiens
  misc_feature (1)...(338): n = A,T,C or G
gctgaaacctgcanaggccccacttagtgaatatttccaagaaggagacctgcagtcccccacagaacttcaccattgggctatgcatagtgctgctttattggtaaaacaggaagatccaatttacacctaaccctatttcatgtttggccaacaatgtatccatggaaggacccttcatgtgagattccaactgcattctaaacactcagaggacattctgcatgccctggggtgtaagcactgccatgagatgtaaatcccttgtgaagaacagcaagtaggcagcttnaccttgggcttcaccaccttcatgaagactcctctgaccaacgcct

SEQ ID NO: 570 - DNA, 464 bp, Homo sapiens
  misc_feature (1)...(464): n = A,T,C or G
tatccgcactatgaaagttcntgaaccaaccgactactttagnaggaaacaaatggncattgatgtccttcacccccgggtaaggcggacagtgcctaagacaagaaaatttccggggaaanaactngcccaaaaatngttacaaaggacccaccacccggtatgntcatcttttgtattttggggatttcanaaanntcatttttttggntgngggggggcnaaagnacaaaacnttgggcttttttgggcnantgaattttttattggaatttcccccntggggattttatttgcccanaaaaggaaaaaaaaattggaaanccccccaanaaaccattntgaancttttggccaaagaaanaattngggcccntngttttttgngatggaaanggnaaaaaaaagggaccccttnccaatgtaaaaaaaggcccaanccccgaaaaaggggggaacccgcc

SEQ ID NO: 571 - DNA, 358 bp, Homo sapiens
  misc_feature (1)...(358): n = A,T,C or G
tctccctctgttgcccaggctggagtgtagtggcgtgatctcggctcaatacaacctccgcctcctgggttcaagcgattatcctgcctcagccgccccagtatctgggattacagcaggtacctgctacttctcatgcttcattgtaagaacaagatctgggtccagctcaacaaatacttgaacaaagaatgaagtaagcagaccagtgtaaagagaatgcctcatacaaagttcagaggcccaggagatagaagctggtaaaaccattcaccaagaagccaagccgtggaaaaaaaggangggtgccccaccagggaaatgactgcatgcaaacagagcttggttatagtggggc

SEQ ID NO: 572 - DNA, 348 bp, Homo sapiens
  misc_feature (1)...(348): n = A,T,C or G
ggccncctgtanaaggaatgaaaaaacacacaccanccccttttaggcacctcgnaaaatgactaacatccaaaggcatagaaattgacagcnaatacncaataaaacaggaactcccagatcgaatgcccacgtggaaaagtcatngagagagaaactgactcaaagcatccgctgtgttccggggccatttgngngggcaggatgggggttaccgaggagtgttntggggccatgagcacgggcgngcgggtgatcctcacctcccaactggggtgccttcaaaaactttagtaaacctccctgtgactncgcttcctcgngaacacngtggntgcgggaggattc

SEQ ID NO: 573 - DNA, 360 bp, Homo sapiens
  misc_feature (1)...(360): n = A,T,C or G
ttcttcgtagactctggaatggagctggaagctgtcatcctcagcacactaacgcaggaacagaaaaccaagcactgcatgttcccacttataagtgagagctgaacgagcagaacacatggacatatgaaggggaacaacacactctggggcctgtgaggtgcagggagagcatcaagaagaacagctggtgggtgctgggcttaatacctgggtgatgggttgatcttgtgcggcaaaccaccatggcacacatttacctatgtaacnaaccttgacatcctgcacattgtaccccnggactttaaaaataaaagttggncaaaaagaaaaccttaacttacttttaaaaaaaaaggt

SEQ ID NO: 574 - DNA, 314 bp, Homo sapiens
ggtgagaaccactacaggacaaaaatgagctccttttttccagtctcagcccaggagggatcttcacagagaaagcaagcccagcccatccccacagctggctccctggtgcccattctgaaaggctggacccatcctgacctgtccctgccccaaggactgcctggtgagggatggcttaccaacactgtgactcagtccttccaacatgcccaacaggtcaattctgggatattccttacaggaattaatgagagcacattgccggtaatgttggcattaataaaataacatttaaatttaaaaattccttt

SEQ ID NO: 575 - DNA, 363 bp, Homo sapiens
ctccccattatggctccgcaaccaggtggcgctaaagagagaccctggaaggatgcgggaggaagcggagacctgctgtgtgcttgctgtggccctaagcttggcagttggaccctcagtcggccccagtctcccgctgtgtgtcaccccgtacttccagaaccagcctcatcttgcccctcagaggtacctgctccagcctggtgacactccctccgaacaagttctaatctcaccctcccatttgacccccaagccccaggggtacaggcttcctgataccttaagggcctccctttctgcctttctggtttttggtaaccagcaaacagttatttctattaaattctctccatcattgtg

SEQ ID NO: 576 - DNA, 278 bp, Homo sapiens
  misc_feature (1)...(278): n = A,T,C or G
gcttgatgcagggcagcagggcgatcttggaagctccatattgaagatggtggagccacagtttgaaaggagtctgggttggaggagagctacaggcggatcaggaacacccatcttggatttgacctgagtgaaaaataaactgcaatcattatgttaaaacacttgcatatttggggggattttttgtttatcttgtgaaaatgcncattaacctctattgtcataataaaaatccttaaagttggtgctaaaaataaacgcaattttgaaaattc

SEQ ID NO: 577 - DNA, 85 bp, Homo sapiens
aaacaccaaccattgaggttgagaccatttccagaggaagaagcatggggccatcatttattaaaatttatgaaatgttttgcgt

SEQ ID NO: 578 - DNA, 320 bp, Homo sapiens
  misc_feature (1)...(320): n = A,T,C or G
ttcttcatctgctgactatgaaacgattctagattgtttgccaactaaatgtgatgctttcccaatcaactacggcaggccagatggcactttcacttctacgggctccctctgtggtgggtaaacgtgcagagaagactggaacactgtcttccaggagcctaggttacactgatcccagcacagcacttcctaccaagtaaagatcaattttaaaaatgaatgaagtcaactgaaaaagctcccaatggccaaagctggaacaatttgagcaaagaataaaggtatgntnggnttntancccagaagacaaaataaat

SEQ ID NO: 579 - DNA, 652 bp, Homo sapiens
  misc_feature (1)...(652): n = A,T,C or G
aatagaggaaagccttccttccggaaaagagcccctttccttcttggngccncaagccngngaacaacttccctaatnctngcccatccccttcaagccaatngcttaatccaacttcaaagccttttcttcccaacaaaacaattcccccttngcttcaaagccaaaacttaactggggtttttngtggggggccaacaaccaagaaaagngtggcccccaaaagccccccctngttggcggaagnaaaaaaggggttccttgggccaagccccaaaagttggccttttttggaccaattggccccaagtnggttcccccttggggaatggggggaaggaataacccccaaacccaccaaattcccaacccccccaagngggaaggggttgggggtaaccaaaatttaaccaaaacccttgggggggaaggaaccttgggggggggaattggaaaccccggggtttttcctttccccttttttccccngggnaaaggccnttttttccccngggnaaaanttggggggccaatttgggttnggggggcntttttttttcccccttgggngggggaangggggaaaaaaacccttggggggggggggaaaaagnaaaaaaccccccaangggggggggggaaggaggattgg

SEQ ID NO: 580 - DNA, 314 bp, Homo sapiens
  misc_feature (1)...(314): n = A,T,C or G
ggcaaggctgtgctttaatcatcttcgtaacccaagtgctgatcagcgaaccaaatacacacagaaataccttgcgccctggttgcttttctgtgctagaatcactccagacttcaatcatcagcctgctacaagccactcccaagcctgggacttaatcgccagcagaaagcacgtccacacgtcctctgttacctcctctagatgctaaggaatgtgactccaagaagattcaaatagcaggatcctacagcgttctgccatcatcttattcaacaaaagtcttttggtttnacaaanacccattcatattt

SEQ ID NO: 581 - DNA, 328 bp, Homo sapiens
  misc_feature (1)...(328): n = A,T,C or G
actgagaaaccgangctcaaaaaggctgaggaatttgcctaagatcacacagagaaacgggaagctgttggggccatgctgttggggccagagcctacgtatgcactgcctccagtgtgcatggggagaaagcaacccacatcgactgctgcaatgagacagctgcttttcctgtgtttgggcaccgaatcatctcatcagccccactgtgcaagttttctcctctccatctcaaagatgtgggcaccgagcctcccatggaataagtaatttccctggggtcacacaacttanctaagnggcagcccctnggatccaaattgtaaag

SEQ ID NO: 582 - DNA, 324 bp, Homo sapiens
  misc_feature (1)...(324): n = A,T,C or G
ggtaaaacaccctcaaggatgggcactgcacaagactgtaacaacaaggaacgtggctttgcatcctcccagcaacaaagtctaccacggatcccaccccactctgatttcggctcagccgagaacttgaaataacgggcccactgcctctgctccacgaggatccatgccatcatggcactttgggaggcctgtcacgagttacacaggcctaggctgcccacaccccagctcagcagaaaaagagaactgcaatccaagtcagacagatcctgcctgggcntttccgcaaaaagcctggagagtctgaccagcaaagaaaca

SEQ ID NO: 583 - DNA, 238 bp, Homo sapiens
gttctgttttaaaattcttccagtgtccagttgccaatgggattaaaaggaaaacgatgaggaaaaagttatctgaggtcaatctgcaatggaatatgttcctttcctgcctgcttagatgtcttctgatagtcacgaattgatttgtagtcatacttctgtaatatctatatgcatgtgaagcactgtctgatgttaaaatataaacatcatctatagtaataaactgagacactgc

SEQ ID NO: 584 - DNA, 427 bp, Homo sapiens
  misc_feature (1)...(427): n = A,T,C or G
gaactagagagtggtgtacacaatccctagcagtactgaccctgcttgttggacttaaccctgaagtcacaggtaatgttatttaggaaaagtatctctgcaatacacatactcttttagtacaggtagtaggagctagttaggcttagagcagtcctacctcttagccatcagtacaccaaccaagaaccatctttaccataggaagaggaaagaaagagccaagagngnaagcctagtctagagtctagagtaggattaatntaccaagccataggggattttattcctagtagccaccaagttttcctccaaaaaggaaatccaagtttagngtngnggaaaaggaaatttcaaattttgnggcttattttgccccatttggtaaattccaaccaccttttttccccaattttaattctccaat

SEQ ID NO: 585 - DNA, 459 bp, Homo sapiens
  misc_feature (1)...(459): n = A,T,C or G
gtgggatgcctccatgagctccaacaggcagcctcgccggcctcccagctctgctcagttgctcagcaccccatggagaaggtgaagcccataatgaacacactgccctggccacttacttcctccaaccaaagaagccctcatctcccgggcctagaccatttccggagaccagcttgtgacagagccacaacctccggtcactctgtcagctatctgcagttcctcctttttcctttcctctctcccctcataaacaatgactgttgatgtttccactagctacagatgctgatgccaagattagctttggtcaagatgatattctccatcctccaaaacaatgaccaaaatgttttattttatggctaggaactttactttctttcatatgaaatatttaatgnatttttcactgngctcatttttgntttgngnggggataggtaatagcaaaac

SEQ ID NO: 586 - DNA, 433 bp, Homo sapiens
gagatggggaaacgaatccagaggttaatgatatgtccaccataactcaactatcaagatcctcaagtcagtgctctttccttcatgtcctcaggagttctccagggacactgtaaagatgagaaggaggttgcacggtctgaatgtttgtgtccttccaaaattcacatgttaacactgaatcctcaatgtgatagtgttaagaggtggggccgctgggaagggattagatcatgaggacagagccctaatgactgggattagtacccttataaatgaggccccagagagctgtcccttccaccatgtgaggattcagtgagaaggtgctgctgatgaaccagaaagcaggccctcatcagagaaaggatttgccagcaccctgatcttggactttccagcctccagaaccatagtaaatatacttctgttg

SEQ ID NO: 587 - DNA, 525 bp, Homo sapiens
  misc_feature (1)...(525): n = A,T,C or G
ggtctctctntgttgcccaggctggagtgcagtggtgcgatcatggctcactacagcctcgacctcctggttcaagtgattctcccgcctcagcctcccaagtagctgggacttcaggcacacaccaccatgcctggctaatttctgcattttttatagatacagggttttgccgtgttgcagactgatctcaactcctgaactcaagcgatcctcttgcctcagcctcccaaaccgctgggattacaggcatgaaccactgagcccagctgcctttcacacttctactgtgcattagaatcacccaaagagcttgttaagacagattcccaggctgcaatcttggaggcctactggcttagtagctctgggctgaggcctgagaatatgcattcctaagaaacctcaggtgaggctgatgctgctgtgtgtggactgctangctangacangggtttnttttttcctaaaaaangggttaaattttttgaccncaantttnttatagggtatttttaaaaggga

SEQ ID NO: 588 - DNA, 524 bp, Homo sapiens
  misc_feature (1)...(524): n = A,T,C or G
atgtaattaaggatcttgagatgagatcatcctggatgacccaggtgggccctaaatccaatgagaagtgcccctataagagaaagacgaggagaagacacagacgcagagaaggcgacgtgaaaatggaggtggacattgaagtgacgcagtcacaaaccaaggaatacctggagccactggaagctgaaagatgcaaggaaggattctctccttgagcctttggagagaatccggctctgccgacaccttgatatcgggctgctggcttccaaaacatgagagcatatatttctgttgttttcagcccccaagtttgtagggattggttacagctgccccaggaacataatacatgattgaagaccagcttttaatgtacaaaccctagtacaaggcactgcaaacctcagagatcttcacacaaaaangnnattttaaccnctttaaaaggnnaaaaatcttttttcccncccntnnaaagggnttnncccnaggnccttgaggggttataatataagagg

SEQ ID NO: 589 - DNA, 551 bp, Homo sapiens
  misc_feature (1)...(551): n = A,T,C or G
atgcctggtcatcctcaacctggtggacacgccttcattcactggagaagcagcagcagggcttgcttcgagtccagggaagcaagaaaacagatctgatccccctgtggagtgtggagtaggggcactgcccttgatggtgggagtgaaaccaacttgtttgcagataagattgccgagacaattccaatggggaaaagaagtctttccaaacatgctgctgggacaactggatctctacatgcaaaagaatgaacttgaactactatttcacactatattaaaacaattatcaattattttgtgactgaaggcaattaagaagcagcaaatggaaaaagctctcgctgtcttccccttttctgcctcaaggnaggatataaattctcgtttactggacacaactctagactctattcaccccnagaaagcaccncaaaaatatnttnacnaacgcttttntttttttttccccccccaataangtttttcccccantggtttccccccnnaaaggaaaagggcttcctttggccnngcattttttttaa

SEQ ID NO: 590 - DNA, 500 bp, Homo sapiens
  misc_feature (1)...(500): n = A,T,C or G
gtgaaattcatcttagcttntgggattggctcctactcaacatgcaagcactaatcctctaacatgcagagacagagtctcactctgttgccaggctggagtgcaataatgccatctcgactcgccgcaacctccacctcccgggttccagtggttttcctgcatcancctcccaagtagctgggactacaggcacgtgccaccacgcccagctaatttttgtatttttaggggggacagagtttcaccatgttggccaagatggtcttgatctcttgaccttgngatccgcccacctcagcttcccaaagngntgggattacaggcatgagccactgcgcccagcccatacataagaattttaagtcncnncatgcctccnttantnaaaaaaccttnttaggaaaagagaatcagattttttcgttggagtgcttacaatggatgaatccttttagcatcattatctcattttaatttgcaagccaatttttaagaaa

SEQ ID NO: 591 - DNA, 526 bp, Homo sapiens
  misc_feature (1)...(526): n = A,T,C or G
gaagtcagagattggaagcaccattgtttgcttcaggatggagggggcttcctgacaaggactgtgggggacctctaggagctgagagcagcccccacctgagaaccagcaagaaaatagagaataagcctggaagcaacttttcccccaaagcctccagacaagacctcagcctgaccaacgccttgacttcagcttggtgatatcctgggcagagaactgagccatggcttgtcatgccagcattctgacctacacaactgtgagccagtaaacaggtgaaccagtgcttgattagctacgtttcctgtttctgcattggtgatcatggaaacaaatgctgagaaggagcctctgctgcctgggtaccgtgaatgaccacggtgaacaagagggctcagtaaggaaccctgcngactgggtttaactactgtagngggggnngacaatcttnttttttaaaaangggggacntttggggaaaaaaaantttccccnttgggggntggaaaaaaaacccacccag

SEQ ID NO: 592 - DNA, 521 bp, Homo sapiens
  misc_feature (1)...(521): n = A,T,C or G
tgttggcatgaatgaaatataggatgactcatccaatgagaatttgaatgctggcgtaaaaccatagagaaaatccaggttcaataaaaaggctaataattcacagaaatatcctgggatcaaagagaagaccctgtggcctcattggacattagtaggtgccttggaagaagcagaggcaggagacacaaaggacttcaagtgattggaacaagaactgtagaagacatacctaagcacaggagaggggaaagagagcgttcaattgcttttgaaatgagtatttaaaaaccagcctcactcagggtggccccttgcagtcctctgctgagtcaactctctgcttggcagcctcttgtccatagctgactcagggcagaaaggtgattgattgccttaagagccttcccctgacctctcactcggntnttctttcttcccccaccttntttcanaagncccctntaaaacccaagggtttttccaaaaggccttttttcntttgcaaaaacaaaaccagt

SEQ ID NO: 593 - DNA, 392 bp, Homo sapiens
  misc_feature (1)...(392): n = A,T,C or G
ggagaagacgggggtgaatgaaggcccgagaatctccagggaagctctgctctccacctntgcctgtccccagacccggtgtggaatcagtgctcccaggttcttctggttaatacaacagagcaaatccctgaaggctgccgctaaaaggcagaaaccattactttccaactatctgatacggnttggctgtgtccccatccaaatctcatcttgaattgtaactcccgtgattcccacccccaccccaaaatctggccattaaactggccccaaaactggccataaaaaaaactctctgcagcactgtgacatgttcatgatggcatgacgcccatgctggaaggttgtgggtgtaccggaatgagggcaaggaacaccaagcccaccca

SEQ ID NO: 594 - DNA, 460 bp, Homo sapiens
  misc_feature (1)...(460): n = A,T,C or G
gtttttcagacttcctgacatggcaactggcttcaaagagagcggaaatggaagttgccagcgttcttaagacgttgatgtttttcaagttcattttgaaattcccttctctttctttattcaagaagatcaacacacagctaatcatcaccacaaagagtactgcaatcaatataagaatacctaccctccctggtacaagccaaggctggcttcccaggaatcctcanggtttgccagcctttgtgcctgtgccccacttccctcttgaggtgtggtcttggactgaaagggcgtgacctctttggatccactttggaaatcctccagcttcttgcaattggttttattaaaanaccattntgcnttcttgggnaaaatttaatggccttctcttntttgaactttggaaattctttnattgaaaaaaaaaaataaaaancccnngggtttttttggg

SEQ ID NO: 595 - DNA, 466 bp, Homo sapiens
  misc_feature (1)...(466): n = A,T,C or G
gatctatacctggaaatacatatacctaggaataactgctcagtcacatgttaacaagccttttccaccttcttggacatctctgaccaagccgtcttaccaggcttaccatgatgaataagcaaaggcatcacagaaagggaaaattaacagttccatcttcaaggggcatgtgtgtgtgtgagtgcccatgcagatacacatgtgctacaagatgaagtagaagaataattctcacatgaaggcaaatcagggatgaaaagaagctacctctacacaacaaggtgaaaatctaagggcctcgagtaatgtgccccctcccaaagcattattattctaagggcagaactgaactattaggattacattttcaatccaaaatttgnaattaaatgnaatgggnattttaaaaaatgaattaangggcccggaaaangggtnggtttcacaaaacattaaatcactt

SEQ ID NO: 596 - DNA, 347 bp, Homo sapiens
  misc_feature (1)...(347): n = A,T,C or G
gaaaggagaactacttggattccttgagtgtctgaagttcatcatgccacatttcccagtgtaaatttttttgaggaggtgtctccatgcttggcatgaaaaccaggggaggaaaatacaagatgccctactgtgnacagtgaagtggggttttggaagatgtgctccagagaacggcgtctgggcccccacaatctccccatgttgcacagactctctctgactcctgtgatctggccctggctgtcctggaatactaccctctactccaacagaatttttaattgttccacagtgtatttatgtacattgttatctgagcctctgagtaaagcaaaacaggcatg

SEQ ID NO: 597 - DNA, 366 bp, Homo sapiens
  misc_feature (1)...(366): n = A,T,C or G
gtgctgcctgtggttggaggcaaaatcctggatttcctcaatggcttggagttggagggctgttcctgtggttgtgatttnaacccaagtgctagtagaattgagcacttagtttcctggttatgttatcaaaccgaaattcggattggcctccctaggtccctatatttgacaatggccacactgtgctgccaggaacagacactggaaatatcagtgcctcctttcactctccaatccactagcatacaagctccatggggccaggggtttttatctgttttgttcactgctgtgtcttcaagtgtctataacattgcctgacatcgtaaatgctcaataaatctttcatgactgaatgactcc

SEQ ID NO: 598 - DNA, 527 bp, Homo sapiens
  misc_feature (1)...(527): n = A,T,C or G
ttgaatacaaggatgtggtcaactatactgttcttaccgttgaaaaagaggtgctgaggccaggcatggtggctcacacctgtaatcccagcactttgggatgccgaggcagctggatcacttgtggtcaagagttcaagaccagattgggcgacatgatgaaaccccgtctctactacaaatacgaaaattagccattgtggtggcacacgcctgtaatcccagctactcaggaggctgatgtgggagaactgaaccctggaggtggagattgcagtgagccaagatggcgctactgtgctccagcctgggcaacaaagcaacactatgttttaaataaataaataagtgctgagatctcaagaaaatacaatgcctagcttcagaataccatatattatatattcatatggntataaangnatcccnccntggtttntntgcttaaangaanngactttcnttttatagtgatgccaggcnctgctctaagaattttatgtatcctaacttattaaatctcctca

SEQ ID NO: 599 - DNA, 544 bp, Homo sapiens
  misc_feature (1)...(544): n = A,T,C or G
aaaattctggttctcaatgacaccagcatcattactgatttgctttctactcacacacaaatagcctccaaataagaatgccaacactatcaccaaaaaggaaaaattatcttcgtttccccaaggcctgcagctttgataagaaggcaggagtttttggaggagagcgtcgtgttcgtctgtctgtagaccctgagacactgatttacagcaagactcacggtgacaagaatataaacatctcttcaattcatttgatgaggaagaaaagctttgataaagaaacttgacaagaactttacaaggaagaaaaattaccaacaatttctcctatcaatgtagatgaaaaattctaaacaaaatgtgagcaaaatgaatttcattttatgttaatagggattatccttntgatgaaatccaggtttttttacanttnncnganatngggttggnttttttcaaaattcattgaantttgntnccttttgtagagcacctaaatttttaaaaaaccccccngtttccacccaacttgggaaaagct

SEQ ID NO: 600 - DNA, 396 bp, Homo sapiens
  misc_feature (1)...(396): n = A,T,C or G
agtcttgctctgacgtnaggctggagtgcagtggcgcgatcttggctcaccgcaacattctgactccctggttcaagtagattctcctgcctnagccccccgagtaagctgggattacagtcatgcgccaccacgcccagttaatttttagtagagacagcgtttcaccacgttggccaggacagtctcnatcncctgacctcatgatncacccacctcagtctcccaaagngctgggattacaggcgttagccacgtgcccaagcctaaagntttctaatatatgccaaaggaaaagtncnaaaactaatcactnttaaagacaatacncgatnatattttcatgnttataatantacctttataatctacaatngtttttntggaaaaatttgg

SEQ ID NO: 601 - DNA, 373 bp, Homo sapiens
ctgtgtagtattcaattttatggatgtaccataatttacttatccagtcccctgttaatggacatttggattgtttatgatattctgctctcgcaagacttcagtgaacatccctgaatatggatggccatttcaagcatgggcgagtttataccaaggagttgaattgctgcgtctgagggcatgtgcttttggagatgatacagactgccctccacagacagggaaccaattttcactcccggcaataatgtctagaacgtgagccattcgtgtgatgaccgaggttactgtatatttgagcattcaatgtatgctggcactgtgcatcccctcgttatgaccctggaaatcaaaattaaaatcccacttt

SEQ ID NO: 602 - DNA, 352 bp, Homo sapiens
gttttccactctgcttcaagcctcttccagatgcaggagtctaacagagtccacataaacaagaaaccaaaacaaaacggcacaaggtcgaaagctttccccttgtgatacaaccactttatgtgcagagaggcgctcacatgatgctgccaacatgtgttttctgtctcagatttcccttgataacaaaggacatattttagaaggcgtggccctaggtgcatttggccagcaggaatccgagtggagtttggggatttcatttgggtttaggctgatcccctcgggtgcccagtgctacagcccttgatgatgttaaaccccaattaataaagttgttaggaacactttg

SEQ ID NO: 603 - DNA, 352 bp, Homo sapiens
  misc_feature (1)...(352): n = A,T,C or G
gtctgtttcctggttacccaaattccaggcactggccccaggcccaccacaacgcatccctcaaagtctctttggcagaggaaaagcatttctccttgctgcggcaagtcagagccagaatctcgggttctcctgctccaaagcccccactacaccctcattcgcgtgtgattcatgcgtttaggtggttctgctcagcgtcgttttttgagttggggggcggtgagtaagcacaatntaagtttccttcatttctcttctccttgtttgagctaaggaattactttcttgtaccaaacattacacccttggaaaacactccagatggttctcattaaaattccaattcctt

SEQ ID NO: 604 - DNA, 184 bp, Homo sapiens
gggtttgagtgcctgcacttggtgctgggcacggctgagccatcccagacgccaaggagtttacagtctagtccagtcagtgacgaggttaaaacgaattctcgcatcattgctactgcgaatgcaccgggacaggatcagcccttcaaattctcccacgtggtccctgcaggtcttctccaag

SEQ ID NO: 605 - DNA, 447 bp, Homo sapiens
  misc_feature (1)...(447): n = A,T,C or G
gcaacagaaacaatctttgtccaaccagcaaaagagggatttggagaaagaaaatgaagcagcttatggaacagaagaatgcagatgtgacggttgatagaccagctgctatattggactatgaagacaagggtcacccctctggatcggacagtgtggagttagaagaagcctcagctccctgaggattttgtggagtacatccataccagcccatacaggctgactgcagacattaattttatgtcatgcccctggaagctgagcccagttcaaatggctgctatctttctatctactgtgtagagaatactggagggacaagagtgaaaatagggataatctctatttcatacataagaacccttgaancctgaaaaagttaaatgaagtncattaggattgggggtaaaagtactggctttaaagttaagtaaaccttgtctc

SEQ ID NO: 606 - DNA, 636 bp, Homo sapiens
  misc_feature (1)...(636): n = A,T,C or G
gaaactcctgcccgaacttgggtgaaaggcaccggaagatgccttcggggaaaatggcggcgctgctaccgcaccgcctttgcctggaacacaggcagcttccagctatcgattttattgaccggagcgccatgccggcttcctaacctctttgccctcaagtgtaatggcgctgcgattgggcttcacgccgtcttttttcccctccccaatacgcgcgttcattggacgagagccgaagatcgagcgttctgattgggtgctagcaaaggcggtccgtttgaacgaagccaagagctgcataagggcaggaagctggactgctaggatcaggcgactacaaggagttgtgaagcgacttgcaccgacctgggggcagcaagaggccccggggctgctttccgctgttcgactctggcaggctcagccaatcacttgaaggagggaaccgatttgagcgatggagccactctggccgagttagagctgagattatcctgagttccttttactggtgttctcagagcatccttgactttggagaatgggtatcttctttgtttgcctttangggagggaattatggttagcattttctgggggcangcgccatgcccagcatattacatatttcat

SEQ ID NO: 607 - DNA, 473 bp, Homo sapiens
  misc_feature (1)...(473): n = A,T,C or G
gtggggtctttcaacttttagcccaagatgatggaagtttccaagaaccaacagaaatatctggaaacccattttcagacatgtcctgaacactgaattataactaaaacaaaacctttgtgatttcaaggtcatggaaacagtggaactgaccccactctgtccagctccaaaggccatgctcttttcaggacatgccttcactagatgatctcttcagccccctcccgactctgattttgagtcctctggaattgtctcggatgttcaaggcttacctcactctcataagctcagcctgttttttgtttatcgtagcgtggcctttctttacattccaactgcagacctggttgtcattctccctgtgacatagcatttgatgtccactgggttctagttatgtctatataagtacaaacagncccatttctttttttccgatccatctcccttatcttaataaaaaggtg

SEQ ID NO: 608 - DNA, 176 bp, Homo sapiens
acacccatgaggtataaacactgttgtcagaggaaacagtggaaatgaggaggctgcccttgtcttagagaacctatcaggaaatgctttcctgaatagaaagtatccttatccattgttcagcgtccaatttcccctttgttccctgtttaataacaatagcaaaccttaatttc

SEQ ID NO: 609 - DNA, 578 bp, Homo sapiens
  misc_feature (1)...(578): n = A,T,C or G
gttttatgataccacaaagagatcatctttgttctcctcacctcaagaacagatgggtagcaggggtggtggctccatgactcactacctcctcacgcccgcaaagactgtctaagcagcaggcaaacttctgggatcaatagggttcatggcaacgcagtgtctgccagcaaaccttggaggaggccattagtcaactggtgacctgccaccctgaccactgcagccctctgatgcagattctcagaaaggttagctggtgctgggaaacttaaaaggtcatggntatctcggagtcaaaactccacagaaccagagtgaagagtactgcagaggagctacaaagtcagaggtaagggccacattggaggccaaagtcaccacctgatagctgtgtgaccaagaanagctaagcagaagaactgcgatgtgtcacatgcaatagaananggccaaccactgggaatggctgcctttcaagaacactgaaataaatgacctctaaatggatgacaataatggcatgaggtcagatgtccaactgagatccagaagcaggtcccaagtcaataactttc

SEQ ID NO: 610 - DNA, 494 bp, Homo sapiens
gctggagtgcagtggcgcaatctcggctcaccgcaagctccgcctcaccgcaagctccgcctcaccgcaagctccgcctccctgcaagctccgcctcaccgcaagctccgcctcccgggttcacgccattctgctgcctcagcttcccggatagctgggactacaggtgcccgccaccacgcccggctaacttttgtatttttagtagagacgaggtttcaccttgttagccaggaaggtcttgatttcctgacctcgtgatccgcctgcctcggcctcccaaagtgctgggataaaggcaaatgttttaaccaaaaggagtaactctgtaagggttccatgtgagacactgtggtatcttgtaggtggaaaaaactttacgatatgagaagaataagctgcgaattcttcttcttttcacattaccaaagatacatggtttctctcttattttaataagtcttattttaataataaaattgtaattgcaagcc

SEQ ID NO: 611 - DNA, 447 bp, Homo sapiens
  misc_feature (1)...(447): n = A,T,C or G
ggcaaaatctttttcccttgaagactggaaatattatccatgttgtcctccggaatattttcaatgacttgtgccctgccagctctagcttttgaagggtctacactcatcatcaacagattctgggggttcatgcacagatttcttacctgggtatattgtgtgatgctgagctttggagttcaactgatttcatcacccagcaaccagcccaggaagccagcccattatccagaggaaccaaccaaggaagccagcctgctctctagaagctagacttgtaggaagccagaccactgtctctagcaactgatccaggaagacagaaaagaacacctcaataacaggaccaaagtggccaggacttgactggatgaagtaactgacagcttccctaatttttggncctacttccaacagaagaacaaccagagaaagccaagtatg

SEQ ID NO: 612 - DNA, 668 bp, Homo sapiens
  misc_feature (1)...(668): n = A,T,C or G
atggagtcttcctctgtcatccaggctggattgcagtggcaggatctcggcttactacaacctccgcctcccgagttcgagtgattctcctgcctcagtctctggagtagctgggaatacaggcacccaccttcgtgcccagctaattttttgtttgtatttttgtagagaccgggtttcaccatgttggccactctggtcttgaactcctgacctcaggtgatccgcccacctctgcctcccaaagtgctgggatgacaggcttcagccaccgtgcccagccaagatcaagttgttgttggcagggctgcactccctgcaaaggctgtaggagacaacccatctttgcttcttccagcttctaggggcttccgcagcatgccttggcgtgccttggcttgtggctgcattactccaatctctggctgtatggcaaattacctcctcctggtccatctatctccctgtgtgtcacttataaggacagttatcattggatttaatgccctcctggatgacccangatgatctcatctcaagatccttaacttaaagtacaccacaaaagtcccttttgccaaatgaaataacactcaccatttccgangataaagacttggatacatcttttgggangncaccattcaacacactacactaataaatat

SEQ ID NO: 613 - DNA, 270 bp, Homo sapiens
gcaagaatgatcatgctattatattcaccgagtctaaaagttattgcaaacgaaaggatagcctcaccatcattcccagagatactactcagcaaaacagcccttactgagaatgagaatcaacccctggaaatctccaaaaggacagactcctaaagctgccaacagggattcaccaagaacatcactgcagatctctgcagtcggtttcatcaaatattcaacaaagcacggctttcaaaatcaaataaaaaagctttggttacagct

SEQ ID NO: 614 - DNA, 193 bp, Homo sapiens
  misc_feature (1)...(193): n = A,T,C or G
gcaatggatgctgcttctcctcaagaaacagcacatgcacagaaacaaaacatcccagaggtttcactccctcaggaccagcnnagaccacagactaaaattntaacctggacnaaaagaggattcaccaatgcaatttttgagaactaaagtcttnaaaaattaaattttacagaagactacagagcatctt

SEQ ID NO: 615 - DNA, 599 bp, Homo sapiens
  misc_feature (1)...(599): n = A,T,C or G
tctgggggctcctgcattaagtcaanaactgaagggctgctggggcgaaaaacaaagggnggactctnaactttttggcttggaaagggggaaccctcggggctggggnaccaaagcttgcngganttngtttgacctgaggcncagggatggggcttngggctcccaaaagttcttcctggctgggaatcattggctggccaaggctctgcgtcccatccctggtccctcttccctgcangctcctcggacttgctttcttctcctgacgctgtcaagctgtactccaaaaatgttcttgctggcaaaagttggcgattaagctcttggatgcaaaagaaaccgtcctctgcatgctcccgcccttcttccaaacgtcgtccctttccagaagaaactcgaggaaccctcaagtgctcaagaagaagctccggtgacgaaggcactgagcccgatcccactgtcctcaagacttcaagaaggggggaaaacgaaagcattcttcgtcaccggggaatcactggctttgtttccaaaattattttggccggtttcaccttttactgggactctgtaaaaaataaaaagatgtgaattgg

SEQ ID NO: 616 - DNA, 660 bp, Homo sapiens
  misc_feature (1)...(660): n = A,T,C or G
gctgccaggaagcatgctggggaggcctcangaaacttacaatcatggtggaagatgaagaggaagcaagcacgtcttaccatggcagagaagggagagagcacgaaggaggaagcactacacattttgaaacaaccagatgtcggataaacagaaaccaacacttttgaaagacttgctctgctgccgatatccaccagcctcctgatacccaccctccattctgcagttttaacacagcaccagaccagcattcctttttgataagagaccactggccatgggatggttctgttcagtctgcagagctgcacacagagggtcntcgtgcccctgcttcaccttttgacgtatagggcctaactgtaacacatttaaaggtttctccctctccatcacaaagggaacatgggacgtgtgtaacatacatgctggcttactatgcatgtgcccatctccctcttgtgaatattcatagctcctcctatagcctgctgaataggtacacttaacccaccccttcagcacaaattcctgtctcgtaacctcctcctaaaaggattgcttttctgttcaactggangctccactttctggttgaaggcgnggnacccttcttttaaaaaaaaaccctncnttctnaaattatagaatttggga

SEQ ID NO: 617 - DNA, 394 bp, Homo sapiens
tgttccaagcttcacatcaattcctgacaagggtgacagccagagggcagacagtcacagaccatagcctctgactgctggagctcactgaggtaccgctcagcctgcttggttgcatcctccgcatggcgagtcagctctgagatctgaaggtcagcatgcttacgctcggcctcacatgtgtcaaagtgattctggatctccttaagtcgatccaacatctgcagttgctgtttttccccattctccagttcacgtgttaaattctacgaataaagcatgcaaaacatcaggaacaaatccttgtcaaaattggatgtgtagcatatcatcaaacaagaatctctaatgtcactgaagtggaaatcatctgtattaaaattcattagcaatc

SEQ ID NO: 618 - DNA, 312 bp, Homo sapiens
  misc_feature (1)...(312): n = A,T,C or G
antganattnangggggnaaaantttgnntnagggcttaagtgacaatgaccctaatatttctgagtactatccanggggattcacacagngngnagcttcaccttcctttcacngtgacagccttcaaaattgtctnctttcccaaattcctacaagcaacacccacaactcccgtggcatgaaaaaaaatgggagcagnggtgcacatctgtaagtnccagcctactcacgaanttgaggccnggaggatttctggtgcccanaagttcanttgaaggnctgcctgccaatatangaagactctatcctc

SEQ ID NO: 619 - DNA, 405 bp, Homo sapiens
atggagacggtgtctcccgtcagggcaaagacttggtgcttttggttgcatataccttataaaagatttgggtttccaaagatcagaattctttgactgtgaaacaaactcactgtgtgtccagcatccacctgagttttctctgcaccactccaatgtgactgaggagtcaaaggaaactggtgtgaacatgaagctcatgctacctgctgtgccatgagtagcaaagttctttgtgtctgatcctggagtcctgtgtcttctgcagaatctgtgaaattgtagccagctaacctgttagcttgtaagatgataaaatctcagatccttcacaattctctatgatatggtgatttacttcttgactacagagatgaaaaatataagaaattgtgactaacactg

SEQ ID NO: 620 - DNA, 324 bp, Homo sapiens
atggagtctcgctctgtccccaggctggagtgcagtggcccgatctcggctcacagcaacctctgcctcccgggttcaagagacgctcctgcctgtgccttctgagtagctggaattacagcttgttgcagttcttacaacttattattgagcccttaagtctatcttgtctggacatgtagcagaaaacaactttacgacttactaaagtatgaggaagacggcgtctcactttgtggcccaggctggagtattatgtatataataatattatacattattccactttgaccttagtcaatgaagagcgagattaggagtgtc

SEQ ID NO: 621 - DNA, 312 bp, Homo sapiens
gaacaagctggcaccacctcagaaacacacaggaagacagcgggggcctatctgccacgtagcaggagcctgcagagaaagaaattgacgggaggagcaggcggcctcccatccggcctggctgactcattatttgcttttctgatttcacatctattcatggtgggaaatggagaaaaacgattacactccaaagaggaaaatgaagcccccggagtcctcctgagatagccactgaaaacatcttggctcactcccttgcacctcctatgcatacatgttttctttttcagaaattaaagaatcatattg

SEQ ID NO: 622 - DNA, 543 bp, Homo sapiens
  misc_feature (1)...(543): n = A,T,C or G
gacctgtgaatatgttatcttacatggccaaaacgacgttgcaggtgtgctgaaagtcacaagtcttgagatgggaaaattgtcctgcatcatcctgatggattacatctaatcccatcggtccttaaaagagaagaatctttcccagggagaaagatataatatgagaaggacttgaccctgtgtgtctggcttcgaaggtggagaaatgtagtcataagccaatcaacgcagctgtctctagaagcggaaactaccttcagtacagaaccagcaggaaaacagaaaccttggtcctatagctgcaaagaacagagctctactaaccacagcagagagcaaagaacaattgccttagagcttccagaaacaatgcagcagatcaccaatttccttttagtctggccagttgtgtataaaccttctgacctatagtatagacctgtgagataataaatatgtgctgntttataccactaaaaaaaaaaggccagccgaggccaattcagcttggacttaaccaggctgaacttgctcaaaagg

SEQ ID NO: 623 - DNA, 690 bp, Homo sapiens
  misc_feature (1)...(690): n = A,T,C or G
tttgggacccattttcccccanaggngggncccattgggggggaaacncccngggtccaanttccccnaaangggccgangggaaaatccaacccctncggtttnttnccccaaaaaggggacctttnaaagggggccccccanaaaacttggggggaaaatggggggggggaaaaaaantaaacggtttttttgaaaaccaaatngggaaggagggnganccaatttttatnttttnttgaaaaatggggaaggcccttcttaaacngggctttnanttnggggaacaacngggngggggatcaatggcctggnnaanccccggggattggttcnggattcccttnaaccaagagaancntgnccttttttgaacaagcnccgttggcacctttgcccttacagtaaaacctcccccaagtggtgccccttcccaagaatcattaaaatggggaagncctgaaggaanccaaaaacccaaggnaatggcncttggggnaaactcccctggnggaggggggatcttnttggacccctnggaatcaactttnttttttaaaaanggnccnggccnnaaagggggggtttgcacaaaaangcccttgaaaaaagnggtcccaaaatcaacctggntttaaaaaatttcanaaaaaattaccatcttggcattttttgaactttttttgaaaa

SEQ ID NO: 624 - DNA, 404 bp, Homo sapiens
gtctctctagcagtctgacaccttcaataagagacagtcacatctattctttctgaagacaactacctggaggattcatctacgtgacaagaaccttggcttccacaacaacccccttaccttatctcaagctgatttcaactcttcaggcagagcttaaccctttcaaccaattgccaatcaggaaatctttgaatccacccatgacttgtaagttcccccacttgcagttgcccaacctttctgcactgaaccaatgcatatctcacatattgatatgtcttatgtctccctaaaacacataaaaccaagctgtaacccaactaccttgggcatgtgtgctcaaggctgtggtcatggatcatgatccttaatctttgcaaaataaacttttaaattcattg

SEQ ID NO: 625 - DNA, 369 bp, Homo sapiens
gctaattcctcaaaacactactttcacctcattgctcctttgctcaaaagcctacttggtgcatagcacagcatccaacacagagaaggaacacagctggactctatttcctagccttcctttgcaggaggatgtggccagtgaaatgtgggcagaaagtatgtgcaccacttccaggtatggttgacagaaacctgctgccttacataatcattcgtcttctttcctcttctgctgtgactttagaagtggtgaagatggcacagccacaagatggaaaaagacaaaactgcttgagagattcacccactaggaacacctattttgaacttgacataatcaaaaaataacttcagttggttttaaggc

SEQ ID NO: 626 - DNA, 371 bp, Homo sapiens
gacctccgctgacctgagcacttcctgcatgaaaggggctcaataccaaggaagaaaacagatacatgcaccctttctaagcagcaaaactgggttcaaatcctcggctacatcacttatgtgagatgaagtcccactatattgccaaggctggacttgaatccctaagctcaagtagtgttcccacctcaccctcccaagtaactgagactacaggtgcacaccactgtaccagcataattgcatatcttatcaatcaatccacagccactaaatacctactgaggtatctgtgtcccctgggctttttccaagagctttcaatatggttagatttgtttattaaatttgcataaatatgtgatatgagt

SEQ ID NO: 627 - DNA, 561 bp, Homo sapiens
  misc_feature (1)...(561): n = A,T,C or G
ttctaaacctacagtgatatggaagagtaatctgccaatagtacagaaacaaatgagaagtgttccgtcctgaagtcaaaaagttcagggagcttcagccctggtgggtgaagggagagatttggagacttctttcctatgtgatgtcctctccgtggattggtttgtgaagctgacggccatgaccccagaggggaagctgttagagaaacgctgtcgcccatttgttaaccagacacgtccactccagtgttctccacagctactccatgaggcggacagcagcagccccactttgctgacgggaaacctgccacacggtccccagcagggaaggggctgggctgggactcagacccagagagcgactgtctggtggatccaaagtcaggagttgctcgtctaccttgagtccaaaaaggtcgagacaagcagtcccagaagtggcaagagaaagtttgggaaggcagaaaaaacactcctgangtgactggtcacctgctcactccaaaaatgttacctttanggttaagcttttaataaaccaagctaataaaatct

SEQ ID NO: 628 - DNA, 389 bp, Homo sapiens
  misc_feature (1)...(389): n = A,T,C or G
gctggagtgcagtggtgcgatcgcagctcactgcagccttgncctcctggactcaagtgatcctcccacctcagcctcccaagtagctgagacaacagatgtgtgctatgaagaccagctaatttttcttttcattttttgtagagatgggggtctccttatgttgcccaggctggtctcaaactcctggcctcaagcaatcctcccatctctgcctcccaaagtgctgggattacaggcatgagccaccatgcccagcagagggaaatttatttagagagaaaagaggacattcacttggtgttcttcaacagctaacccagatgaccaaaaccctctttcagaagcccttaacatatcctgcaacagcaaaaaaaaggtgtttatac

SEQ ID NO: 629 - DNA, 204 bp, Homo sapiens
attttgagcttcttgcaagcagaaaaaatatcagaatcatctgcctcacaagtgtctggcacagtgcttgtcacataaagatggcccacaaaacttcaatgacagaagagggaaaggaaagaagtctgacagatatctaactatatccaagaaagacatgaaaattcattgatttataaatttgcatataaaatgtaaagaaag

SEQ ID NO: 630 - DNA, 173 bp, Homo sapiens
gtgcaaggagccgcacatccgcacaagtgctgagaccctgcccaggacaagcttggccgcagtattccctttggcacccccacccacctggaacaaagcctgatgtaaagtctgggtgcgactcagaccggcctgggaaagaatttatttaataaatggtggaaagtggcttc

SEQ ID NO: 631 - DNA, 359 bp, Homo sapiens
caacaacagggtgcctggcacaaggagatactcagtaaaactctcatctgctgtgtcattaaggggaacacttaatggctcacgcctgtaatcccagcactttgggaggccgaggcggaaggatcacctgagcccaggagttggagaccagcctgggcaacagattgagaccctgtctcaacaaagaagaagaagaagaaaaaggccaggcgccgtggctaatgtctgtaatcccagcactttgggaggccaagaagggagaactgcttgaggccaggagttcgagaccagcctggtcaacatagcgagacaccccccccatctcaaaaataaataaatcaaaataaaaaataaagagg

SEQ ID NO: 632 - DNA, 312 bp, Homo sapiens
atggtgcaactgacctgcagagaagctaattaacttgcccaaagttatggagctaaggaatggctttagaaagcaaaagaaaaattttttattaagaaatgaaaagaaaaaagacgcagtatggactcagactgataaaccatttgcatgagagaactatcaccatttgaaaaagagcttttttgcaaggtgtggtggctaactcctgtaaccctggcaactcgaaaggctgaggcaggaggatcacttggggccaggaggtggagaccagctggcaatcagcaagatcctgtctctaaataaagaaccaat

SEQ ID NO: 633 - DNA, 378 bp, Homo sapiens
tcctctagttccaccaaagatgaaatcacaagcagggaccaacctacctgcaaaataagcttcagtcccactatacttgaccggattacccacacaaagtgcagcaagaatcactgtcaatataagatctcctaaagtggctttgctggaacctctcacaaagaatctcagacttaacctccaatagcctcttgagccaagccaaagatgcatctgcacttgcagatacctacatggatttggaaaatccctctcttcatgaggcctcagaacaacttgaagttcatgggcctgtcagaaagtggcactctaggccagcgcagtggctcacacctgaaatcccagcactttgggagactgaggcgggcggatcacctg

SEQ ID NO: 634 - DNA, 379 bp, Homo sapiens
gtcaccagtttcaaagatttgtacatcctggtgtcacgggtgaaaagcctattggtgggcaagcacataaggcacgtgggatggccaggggcctccagcacaggaaggccccgagtgaaagcctagcagagttaagcgactgtacgacatgctgaaagggatcagtgatttctcctgcagccagttccaacctgctgaaaggaacactgagaaaatatatggactcagtaaacctgagctgcctccaatggcctcactcactccaaccctcaactttgcaatgctggaatgctgagattatcgtccacaaggagcagaagctttcatagaggaacccatcgacgtggctcctgccaaagtcctcaacagggcttcgaaa

SEQ ID NO: 635 - DNA, 376 bp, Homo sapiens
ggaggatgctgtgacccctcaatggatatgctaatcatcacatcagaagcacaactagcttcaaatggaaaccagattgcacttggtcactgacgaagcaggagattaaacaagctacactgtgtctctgggagaacaaaaagccaaaaggcacatttatcacctctgaatcacaatggagtctcactctgtcacccaggctgcagtgcagtggtgccatctgggctcactgcaacctccgcctcccgggttcaagcgattctcccacctcaacctccccagtagctgggattacaggcgtgcgccaccacgcccggctaatttttgtattttagtagagacggggtttcaccatgttggccaggatggtttctaa

SEQ ID NO: 636 - DNA, 193 bp, Homo sapiens
  misc_feature (1)...(193): n = A,T,C or G
ggnngcnngtccnaancnaaaatagtgaggaaangttggctccttctagaggctgngaggaaaggatctgttccanacctctctcctttactttgtggatggccgccttgcccctgtgtcctcacctaatcttccctctgtacgtgtgtccaaatttcctctttttataaagatgccactcatattagatttg

SEQ ID NO: 637 - DNA, 471 bp, Homo sapiens
  misc_feature (1)...(471): n = A,T,C or G
gaggaagnngnagaccactnacagtggggaggaatccatcttccatnntgngangatncnatagcctgccatnngcaacatncatggntgganctnnaagacnttannctgagtgaaacaagccagacacagaagcacaaatattgcatgatcccacttttataaggaatctgaaatattcaaagtggtagaaccaaagagtggaaaggtggtttccagaatagttgctggagaagggagaaatggggaggagtgattcaaaaggtacaaagtgtttatatgcaagatgaataaattctggacaaaagagggcctctagttaacaataatgttttattatacctaacattttgctaagaaaatagaacttacgttaaatgttcttaccacaaaagtaaaaaaaattttagaaatttaaaaataattgtagtgagccaagatcgtgccattgccttcaacctgggtgacata

SEQ ID NO: 638 - DNA, 326 bp, Homo sapiens
  misc_feature (1)...(326): n = A,T,C or G
anggnagnnaggntggaaacaactgtgactatnctaccntngctganacccgtggaggatggatgaacatctcttggatggatgggactgaaactgaaccttgaaagataatgctgagcctggataagtgccccaccgtccctctgcccaaattcaaatccttcatggcccagtgcaaacaacttctcaaaagccccaaacatctttgtctaacaggaagcttttagcttttttactgttttgacattcatttcccacttagtattatgcttacttgtgtattaaccttgtcacccctactagactataaaattcttaaaaacagg

SEQ ID NO: 639 - DNA, 289 bp, Homo sapiens
agacgaggtcttgccacattgctcaggctggtcttgaactcctggactcaagcaattcttccactgtagcctcctgaggtggcaggattacagcataagccaccatgcctggcctcagtcacactttggaaaagaagactatggatctacatgttcattttgtggtcgaattataaccaacacgccactctatctgcctccactctgctttttccatgcctgtacttaaatgcttctcagaatttttaatgtacctccctgccttttgccatagattttatactcactg

SEQ ID NO: 640 - DNA, 254 bp, Homo sapiens
tctgataggtggaagaagacaactctcagataagacttaagactttggacttgacactggaatgagttcacagagtgagagctggtggtttaagaaagcctggcatctcccttgatccctttctcttcatgtgatatgccctgttgccttctgccatgactggaagcttccagtggcctcgccaagaacagatgccagaactatgcttcctgtacagcctgtagaaccatgccaaataaacctcttcataaatg

SEQ ID NO: 641 - DNA, 285 bp, Homo sapiens
  misc_feature (1)...(285): n = A,T,C or G
ggancgnaggatgcgtgatcacagctcactgnagcttcaatccccggctccagtgattctcccacctcagcccccgagtagccttttgagcaggttcagtctggttaagtccaanctgaattgggccaattgttttgatttttaccctggatgaaatactcatatccatcatnntttattaaccccccatntnttacacatntggcngcaagtactgggattcaggcaagagccaccgcgtctagccaattatacaatttttaaaataaattgaaatggtcgttg

SEQ ID NO: 642 - DNA, 290 bp, Homo sapiens
aggattggcaacgtaattcacaaggcccagtggaaaatgaaaatgcaggactccttgctaaaaataattatgaagaatttcaagatagcagagcattaaatcactcacatagctccattgcgtgaggggctctgtgcaactgtatgggtcacatgcccatgaaatggccctgctgctacaagagacaagaaagatcacctctcctgtatcagttcccatattaatcaccccattttgaccattctacaaatgttaactgttatgcttgttattaaaaattcatcaagtgc

SEQ ID NO: 643 - DNA, 331 bp, Homo sapiens
ttactatgagaggtgtgttaaaatctctctctgaaagaaagaaagaaagaagaaaagaaagaaaagaaaaggaaagaaaagaagaagaaagaaagaagacaacccgtgaagcttgctgcatcagtggactcttcctttcacaaaacatttttctgtagtatgctatgctgtttgacagcattttactcacagtagaactgctttcaaaattggagtcagtcctctcaggccttgccaatactttctcaactaagtttatgtagtattgtaattcctttgttgtcatttaaacaatgttcatagcatcttcgccaggaatagattccatctc

SEQ ID NO: 644 - DNA, 401 bp, Homo sapiens
gtaagcgatgccagggcaggctcaggcattctagaagagaggaagaaaagaaggcaacaggaactaggagagagaaggacgtggacaggaggaggtgtttgactagaagtgcgtccaaccaggccgggcacagtggcttacgcctgtaatcccagcactttgagaggccgaggcgggaggatcacctgaggtcaggagttcgggaccagcctggccaacatggtgaaaccccgtctactaaaaatacaaaaattagctgggcgtggtggtgcacgcctgtagtcccagctactcgggaggctgaagcacgagaatcgcttgaacctgggaggcgcaggttgcagtgagcgaagatcgcgccattgcattgcagcctgggtgacagagcgagactctgtctc

SEQ ID NO: 645 - DNA, 132 bp, Homo sapiens
gtaaagatcaaccatcaagatcaaagatccccagaatggcaaatacatacgtgtatgggctcaaagttggaagacattcctctaccatctacttattctggttatacattaaagcataggagggcatagctg

SEQ ID NO: 646 - DNA, 125 bp, Homo sapiens
atcaccatctttgacaagctatacctactaaaagatgtgaagcagacacctacattccatgactcaactgtaaagagaacacaaagctccagtcataggagaaagaataaaataaaactgctatt

SEQ ID NO: 647 - DNA, 290 bp, Homo sapiens
  misc_feature (1)...(290): n = A,T,C or G
gggcattcagataagccatcatatcccctgtggacctggcacgtacacatccagatggccggttcctgccttaactgatgacatttcaccacaaaagaaagtgaaaatggcctgttcctgccttaactgatgacatggtcttgtgaaattccttctcctggctcatcctggctcaaaagctcccctactgagcaccctgtgacccccactctgcccgccagagaacaacccccctttgactggaattttnctttacctacccnaatnctatnaaacgggcccacccctat

SEQ ID NO: 648 - DNA, 166 bp, Homo sapiens
  misc_feature (1)...(166): n = A,T,C or G
gggtcttgccaagttgcccaagctgggcttgaacttcctggacttcaagtggatccacccacctcagcctcccaaagtgctggggattatanggtgtgagctgctccgcccagcccagaagcaaaccttatattcagtctcattggattaaattctatccctccgc

SEQ ID NO: 649 - DNA, 616 bp, Homo sapiens
  misc_feature (1)...(616): n = A,T,C or G
aacatcaaatagcaaatgaatagcatcataagaaagtcnaganaaagaccntgggagaaagaaaaaacttttaccacgcttttttcatgatctttgaacaaggagctctaaattatcattttgcactggctctgtcccagctcatgtttgttgagtgaataaataaataaataaatgcatacatacatatttattagtacatggaacacactgattatcttccatttcctaacaacactgtatgtaatcaggattgcaggcatgttatgaaatactagaatagctgaatattaaaattattctggaatcatgtatgcttattgttggggttatttgtgacgtctccaaagtcatcacagttttctcagcatcaatgtcctcatctcaccccagtcctagttctagtcttaagtggaatagattgnatcagactaatcctctgacagacaacaacggncaactgtggatgaaattttaaaacaactatttaaaaatgccagagagcaaacaaaagcagacaagntaganggcttcaactcacgaaatccantaacgtnctgactggagactcatgccccccccccctgacagaagggacagaagctctattgaaaag

SEQ ID NO: 650 - DNA, 101 bp, Homo sapiens
  misc_feature (1)...(101): n = A,T,C or G
angcagtgtgtggattacactatcactggaaaaatacgnattgagatagataggaaaacgctaaactggcagattagatttttaaataaagattggattat

SEQ ID NO: 651 - DNA, 154 bp, Homo sapiens
gtgaggacacagcaatcctcccagaggatgcagcaacaagaacaccatcttggaagcagagcagccctcaccagacaccaaatcggccagcccattgatcttagacttcccagcctccagaactatgaaaaataaatttcttttgtttataaag

SEQ ID NO: 652 - DNA, 241 bp, Homo sapiens
gagcagcttgccaatttctggaagaaagaaggaggagggagggaagaaggaagacgaaagaataagaggaagaaggaggaggaggagaagaaagaagaagaaaaaaccccactgggattctgacagggattgcattgaatctatagatcagtttggggagtgctgccatcttaacaatattaagtcttccaatgcatgaaccgtataaagtaaaaggcaatgtgagccactctttactaat

SEQ ID NO: 653 - DNA, 353 bp, Homo sapiens
  misc_feature (1)...(353): n = A,T,C or G
gggcatnctnatanaccatgatatnccctgtgacctgcgcgtacacatccagatggncggctcctgccttaactgatgacatttnaccncaaaanangngaaaatggcctgttcctgccttaactgatggcntggtcttgtgaaattccttctcctggctcatcctggctcaaaagctcccctactgagcaccctgtgaccccactctgcccgccagagaacaacccccctttgactgtaattttcctttacctacccgaatcctataaaacggccccacccctatctccctttgctgactctcttttcggactcaacccacctgcatccaggtgaaataaacagctttattg

SEQ ID NO: 654 - DNA, 609 bp, Homo sapiens
  misc_feature (1)...(609): n = A,T,C or G
tgnanctgaanngcngtgctagnatctgcttatcttcctgggaggcctcatgaaacttacagtcctggtggaaggcaaagtgggagccggccagtcacatggccagagcaggagcaagagagcgagggtcaccacctccctcagacgtttctgggacagatccaagccagcagagcagctgctcgctccagagccgtggtgtcttcctggtgcatcagcgccaccgcgtggcaaaacagggcaactgtaggaatcgactttccatctatttggagctcatcagtgcttttcttttaggtgacaacagagttgtccggcaggtttttcctttcttttcttcaagtagggtaacattagttcacatctgctcaaaataatttatgttcgtattctaacagactcatatggcaggaacaagaagtgcacatgccaaaagaaggcagaggactgcaggagcaagacgggttgcaaaggggccgtcatgactancacaatcctggcccctcttctttcagcnttataaagaccagtanaataatantgcatgagttattgtgcagtancacttttcaaaaatatatacattgnggaaacagacccctccaaaat

SEQ ID NO: 655 - DNA, 411 bp, Homo sapiens
  misc_feature (1)...(411): n = A,T,C or G
gtggggtctttcaagatgaagaatcaagaaaatgtttgctgcagccataaaaaggaatgagatcatgtcctcggcagggacatggatgaaggtggaagccatcatcctcagcaaactaccacaggaacagaacaccaaacaccacatgttctcactcataagtcggagtggaacactgagaacatatggacacagagaggggaacaacacacaccaggcctgttgcggggtgggggctgagagganggaacgtacaggatggtcagtaggtgcagcaaaccaccatgacacacatatacctatgtaataaacctgcncgtcttccnnnnnnnnnnnnnnnnnnnnaaaanggnggggggggccttttngtttgggttttaacnggggntntttttttaaaagggggggggg

SEQ ID NO: 656 - DNA, 296 bp, Homo sapiens
cggccctgttgagcagcaagggctccacccagcaccagacacatggctgcagaccacagggtttggaactccacagacacagaggcagcagcagcttttggaatgtttcatccgttccctgctatggtccctcatcagcatcctgcagttctgacctgcccaaccctacgcaagaacttctggtgaaactttctctaatcctctcactttccttcaagacctttacttccgccagctcctctactatttgaggaaggaccaatttctataataaatcccttaatcccataataccc

SEQ ID NO: 657 - DNA, 523 bp, Homo sapiens
  misc_feature (1)...(523): n = A,T,C or G
ggactgtgctaggaaccgggaatcctgtcatgaacaaacacactccaaactggaggggaaatctgaaaccatctagtcctttgcactccatttaaggatgaagaaagtaaggccgagagggggaagcagagtgacctgctcaaggtcacagagaaggtgacgtggtgtacaacgaccttgacggcatgctgaccgtgaagacaaactgcagagattgatgtggtatatttagctgaattttgtgactgagggctgttaaagaacgagaagagaggagagaaagccttatttggaggcctagaagtcacagactgagacgtcaatgccaaatctttcatttcccactgtggctttttgttctctctctaggaatagcaagaattttgtacatagctgggaatgaaagcgaagaaaatgggcccgggataaaggttgagaaaactattttcttttgaaagggcgggcttccanccttggccggggggccaaaaaaaaaaggnccctggatgctttttttgacccg

SEQ ID NO: 658 - DNA, 471 bp, Homo sapiens
  misc_feature (1)...(471): n = A,T,C or G
ccttggtgaggtaagaagagcagctgtgagaattaacaagaccagagttctgtgcctggatccgttcttcatctatgggtgacctcacaagtcctctgcctcaattctgtcaccgaaagaatgaccattttacctggtcaggccctggcatcgggtaagcctcggatcaaatctcatctccatcacttgtcagggaaaatccttaaccaaggagcaaggcatctgtctttaccaaggtcagccaacccactggcaccaagacatcctttccaccacccccgacttgctgcagggctcagatttcatcaagtcctctttatcaagttcctattacaaggcaggcatagttatgcagaagaagaaccagacaaggctggaggcaagacatgtatgtgaggtgtgtggnctcaaaagtcangaggctacatctcccttcnaatatatttncctttnaatggattttctatgaac

SEQ ID NO: 659 - DNA, 303 bp, Homo sapiens
  misc_feature (1)...(303): n = A,T,C or G
tcccatccgaagcacgtgaacatctacggaaccttccctgcagttaccggtcgccgctcacctgctggggcgcgaggtgcagagactgtaccgaccgaggacccagaggctgtcaccacggaggggaagtcctcagctgcacaggttgggggggggggggggggnccnacccatctnttnaggtttnnnttcngccttgttttttnnttccaaaanttttatttttggggggnctnnatttttnncagnacccttcgnnttttnanttttttgggttnnnantaaataccctgaattttaccc

SEQ ID NO: 660 - DNA, 526 bp, Homo sapiens
  misc_feature (1)...(526): n = A,T,C or G
agcccagtgcagctgaaatcctagaagacctcacaactgtgttaaattttcacagctgaccacttaaaggcagttctcttcaaataagagagtctcactctctcacccaggctggagtgcggtggcacgatctcagctcactgcaacatctgcctcccaggttcaagagattctcctgcctcacttacatagatgagtttgataacagtcaagctgaaactaaaaaggccatgatgagataaaagatcaactaaggaacaagcgtgaaaggcagctttcactgaagtcctgaacctatgactgatcttaccaggcatgccaggagaatacgctgccaggttccctcacctctaccctccaactacagattgaaaagtctgctttgcctcttctaaaccattgcgtcttgaacttaaatgtgctgataaactaccagagaatcttgttggaaatacaaanttntattcnccncggnttnggaanggggnaccnagaaatttttntttttccaacaagcttttaaggg

SEQ ID NO: 661 - DNA, 499 bp, Homo sapiens
  misc_feature (1)...(499): n = A,T,C or G
caatgatcacangcatcttcaccaagaggagcttccatctcaagaaagcactctctctttgctcatccgtaagaagaaactccccatctattcaagttggatcatgagattacagcagttcagtcacatattcaggcttcacttccaattctagttctcttgctgtttccaccaaatctgcagttacttccacgagtgaagtcttgaacccctcaaagtcatccatgagggttggaattaatttcttcccaactcctgttaatgttgatatggtgacctcttcccattaatcataaatgttcttttttttttttgggaaagggngtttnanttngcccccnggnngnagggcagggggggggnntgggttaatngaannnnccncntcnggggttnncccanttntcntgcctaancctccnggggaggngggaaaaagggggcccncccnnggcccgggtattttttttgtttttttaaaaaaaaaggggggttcccc

SEQ ID NO: 662 - DNA, 497 bp, Homo sapiens
  misc_feature (1)...(497): n = A,T,C or G
tcaacccctacaggccctgggactcctctccgtccactggaaaggcaactccccacggatggaatccgctcttctccccagctctgctgagcacctcatcagacattttaagcagctgtgtcacatgacttccagtacagggagccccacaccaggcttccatgccagctggttactcccaggcctccttgactggtactaatgcaccatgaccctcgcaagtgcccatgccaggagaccatgaactttacctcgatggacagccttccttcctatgctccagctattctttttgagggagattaccgaatataataagcacatgatatgtacatatgcatatatacaccgtttgtgcatgtgtatgtatagagacacatatgtcactaaaataactgctcacagatatttaatttcaaactttcatttcccctttaccaccttntnggcccaatcttccccaacaaaagccgagggggattaaaccgggtttggtt

SEQ ID NO: 663 - DNA, 580 bp, Homo sapiens
  misc_feature (1)...(580): n = A,T,C or G
gtntgcatcgncagcttnnatatcnncnatgtcggnggcctngngnaacttacaatcatggtnggaaggggannaggaagcncggcaccttttttacaaggcngcaggaaggagaagtgctaagngaagcaggaagagccatttataaaaccatcaagatctcgtgagaactcacacactatcacaaagaacaggcatggggaaaccacccccatgactccattacttcccaccattcccttccaggacatgtggggggattattgggggattaccaattcaaaggatgaagattttgaagttgggggaccaaccatatcactatttgtgaagnatgcttttattattgggcaaatataagttatttgcataaaagttcattaaagtatcttgctcttttttngnaacaagggacaaattgggaagccccttggattattattaccaaaaggctttttgactgggaaataattatatctttccaatatgaagtaagacagccttttgaanggaaactgggngggtnggaatttttttaaaggctttttaaaanccccctngggaaaaccctgggccctta

SEQ ID NO: 664 - DNA, 367 bp, Homo sapiens
ctatatcatcatggtatttattaagccactggagaggccagaattatatcagagatacaaccagcctgccactcattggcctttaccctctgtgatgttcctgacactgccagcaaaacctctctatcacagacttacagcttcctccagctgcaagaaaccctggtcttgttcttatctactaagcaaatgaatattataatcgacaaataaatgagcttgattgggtcctcatccacttattcactcatgtcacaaaaattaagtgaattacaaatatggaccaagcactgaattcatttttaaaaatttaatgaataaataaaatgatatgagtagatgcataaatgaacaaatgactaaaact

SEQ ID NO: 665 - DNA, 461 bp, Homo sapiens
  misc_feature (1)...(461): n = A,T,C or G
aactactatgcaaagaggtcctgctacccgtgctggagagacctcatgtagagactgcagccacatggagatgagcttgaagccatccaggacatttcagccacagatgagctccagctgaatgcaggcacaggtgtaaccccagccaacaccacatggggggcagaagaaccatacagctgagcccagccaacccacaggctttccagaaacaagccaggagtgaggtgggactcttctacattcagtgactcaatttggtcagaactaaggacaatgaggaactggccttgggtgcaaaatttaagggagtgcgaaaaattgagtcattgagataaattatattttaatgcaatttttaatgcaatattttaactaataaaaattaatgcccaaaaaaaaaaaggccagcgnggccaattcagttttggacttaacccaggctgaacttgcttaaaagg

SEQ ID NO: 666 - DNA, 530 bp, Homo sapiens
  misc_feature (1)...(530): n = A,T,C or G
atgcagtcttgctccatcacccaggctgaagtgcagtggcaagatcttggctcactgaaaccgccatctcccaggttcaagcaattcttctgcctcagcctcccgagtagctgggattacagatagtaggactgaacttctgagaggttaagcgacatggcacagattacacagaagagaaagattttgaagatcagatgaagtagttaccttggaatactgcagaagaagggtctggctctgttgcccaggctggagtgcagtggcatgatctcaggtcacagcaacctctacctcctgggctcaagtcctcccacctcaggctcctgagtagctgggactacgggcatgtgccatcacactcagctaaagttttgtgttttttgtagagatggagttttgccatgttgcccaggcttgggctcaaactcctgggatcaagtggatctggctggttcacccttccaaagggtnggaataccngtggggagnactttgnccggcccaatggatttntttttttgggctga

SEQ ID NO: 667 - DNA, 136 bp, Homo sapiens
atgaggacactgaggtgcaagacgtttgaggttatccaagttatccagggtcacacaactgatgaggaaaccgagcctcagagaagtaaagtgaaacacccaagttgatagtgtcaacaaattaaaagtccaagcc

SEQ ID NO: 668 - DNA, 518 bp, Homo sapiens
  misc_feature (1)...(518): n = A,T,C or G
gcccacattgccgtgcggttgggccaagtaactcnttgacccgaggaacgngntgtgngacattgcatttnggatggcnattgaaggggatgtgctattgcccanaatattccaaaccctgggacccgncttagaggggcatggctgncttcagggangaagccggactcccaaaattgttggcaaaatgacccccattttaacncttcangcatgnggagaatgcatgccctgnagagnagggatccatgaatggaagatcttgtggccaagattggcctttnatcatttcacctctccaaacttccatttcttcncaaggnatgaatgatgggaaatanaaattgacctggcngtgaatgccctggaaancnacngtgctgaatccttaaccaccttactnnntaccttttccttaagcnttnncccctgggcttagaaaattaattcaccgnagggggnttggngttntggctttggaaaaaaagccctngncttctttnncctggaatgggaat

SEQ ID NO: 669 - DNA, 296 bp, Homo sapiens
aatctcccttgttgtggatttcagaccttgagtgtacagctccccatctggactctcgtgaaggtcgtggtaaacaacacacagagcatctctttgtcacgggctcagctgacacgtctccctccctcaccactgccccgccagcctccagcagcacatctgcggtggacaatgagtctcatttcacattttggctctgcggtaggcatcatcatggggacagaatacacaccacaagataataaacaagggactgttcaagaacaaatatcaaaataaagacaaaaggaaagagg

SEQ ID NO: 670 - DNA, 338 bp, Homo sapiens
ggacacttgcccttggaaccttgtcttaaggaaacccagatcgaatgcacagactacattggttgttgtggttgacagttgcagctaagattcaagcctacagccagtatctagaccagatatatgaatgaatgagcctttcttgcctccagccttggtctgttctaccggatactgaagtgggagaaataagttgtccccactaaggactgctcaagttacagatttatgagcaaagtaaatgttgtcatggatttcagtcactaaattttgggtggttcattatgcagcaataggtaacacaaactattaaagtctttattagtataacaagcccc

SEQ ID NO: 671 - DNA, 452 bp, Homo sapiens
  misc_feature (1)...(452): n = A,T,C or G
ctggcgtgtccgaatgggctgagctaccggattaagagggacaccccaaagcccccattgctgggttattgctccagagccaatgttcttggggaaaggaagatatgccctttgtcaacattgccactgctggtctgtaaactcctagacggccagctggtggttcacaaaccaggactccttgctctggccctacccctacctaccagaatgaccgtgaacccttccccactcactcctacaaccaggtttccatctcctctctcagcttaggtttccctaactgtaaaataaaagggttggactaggttaaggacttcctgctatttctctctcccacactctaagnttccttaggaatgcttcagaaaacagcangggttggggcaaggatgccacttgagtcccagagcaacttcaatttcatagggcacataaatttatgtgaaagt

SEQ ID NO: 672 - DNA, 513 bp, Homo sapiens
  misc_feature (1)...(513): n = A,T,C or G
ggagaagaataacatttatttaatggatgctgagcaaaaggtattcacaattcatgcttcagggcttaagcctatccgagatcagaagggaacttttccagtctccaaattgtacaactgggagctataacactcaccgagaagatctgcagcttctctcctgaagccagcgagaccatgagcccaccaggaggaacgaacaactccagacgtgctgccttaagagctgtaacactcacagcgaaggtctgcagcctcactcctgagccagcgagaccacaaacctaccagaaggaagaaactccgaacacatctgaacatcaaaagggacagcctccagacgcgccaccttaagggctgnaacacttcaccccggccngggnaaaagnnggggggggtttttcccccccgncccnggggggggnnttttttttcccaaanttttttcccttttttngggaaaaaaagnttnccccaaggggnnggggggagggggaaaaacccccccccaaa

SEQ ID NO: 673 - DNA, 150 bp, Homo sapiens
gagaaatacaggtttagatgagacttgttggactcaagttctttcctccacccatggcctctactcggggagctggtcaaatgtggaatttcgaatatcaaatatgtataaaataaatagatgaaagagtacatctcaaaaaaaaaaacc

SEQ ID NO: 674 - DNA, 423 bp, Homo sapiens
  misc_feature (1)...(423): n = A,T,C or G
agttgatgagctggagaatgcgactggcagcacaggcctagggcaccagagggcagactgtacagagacctgtgagaatggtcagaactccatggatcatgatggaatgatcagggacactataatagcgttcattttatgtattaagccagatttgcacaacaattccattgtaatacaaatgtaatctttagaagtaattttaaagcagcaaatgtagaaatgccaaccctcaagtaaaagaaaacaattttcctaagccaaatgtcttttgtgagagatttcaatggtcatttgattttagtttaaagatcatctgaccttatgattcacccgattcttaaatgcacatctcaaatataattggtccttttcccaaatttttttttttggggggggaaaaggggnttttttaaaaaattt

SEQ ID NO: 675 - DNA, 497 bp, Homo sapiens
  misc_feature (1)...(497): n = A,T,C or G
ctgccatgccatgaagacactcaagcagccctatgaaaaggtccacttggggaggaactgagacctcttgccaacaaccatgtgagtaacccgtcttggaagacgatccaccaaccccagtcaaggcttcagatgactgtcactccagccaacatcttgactacgacctcatgagagactctgtgccagaaccacccagctaagctgctcctgaattcctgacccccagaaactgagataataaatgtttattattttgagccacaatatttttgggtaatttgttggaaggcaatagataactaatacaggctctcataatgtcatttatttgggtccagtcagcatgctttaagatctgggaggtttttttttttttttttcccccctttttttttccaattttncccccccnatttttaaaaaaattttccnntttaaaaaancccaaagggcccaaaaaatttttttntttttnaaaagggggggggaaaaaa

SEQ ID NO: 676 - DNA, 517 bp, Homo sapiens
  misc_feature (1)...(517): n = A,T,C or G
atggagtcttgctctgtcacccaggctggagtgcagcggcgtgatctcagctcactgcaacctccgcctcctgggcttaagcaattctgctgcctcaggctcccaagtagttgagattacaggcgtgtatcaccacatccggctaatttttgtatttttagtagagacgaggtttcaccatgttggccaagctggtcttgaactcctgacctcaagtgatctgcccacctcggcctcacaaagtgctaggattataggcatgagccactgcacccgactgtattgtaaagcatattgacaccttcacctaactgtgtttggatcaagtcactctgggagaaagccagtttcaatatcctgaagatacttaagcagtcccttaatttttgngggggaaaaggnaaaaaggaaaantttttttccccgntttngggggggccccaaaaagggggggggnaaaaaaccctttggggaaaaaaaggncccnttttccccttttgggtttttccccaacccc

SEQ ID NO: 677 - DNA, 407 bp, Homo sapiens
  misc_feature (1)...(407): n = A,T,C or G
gcgtatgtggacataaaaacaagcttcatatattgtgtgtcataggggactgccctacctgccaagggtctcactggatctctgtactcatttcctgttgccagctggtggacaatatggtgctaagaactcaagaagttggtcctcacgttgaacctcagaggtcaccaaacctttctggatagctgctagggagtttctggaggtgctcaatagtgacatatgtcaagttgagaagggacagctgatcttccagggtagagatggatccactccccactctcataaagaagatgtgggtttgtttgaccttcactatataggaaaaagcctcacaaattcttcanccccttggatggaggcttnaanncncccctttttnncccnaaancnaaaaacctttttgg

SEQ ID NO: 678 - DNA, 343 bp, Homo sapiens
ggtcctgtctgggctgtggtcagagggacatgtggctttggaagaacggtcggagagaagcaacattgctggctctgatggaggaagaaagccgaggaatgccgccagcctctacaagctgcagagacaaggaaacagactctcccccacaacctccaaagagaaacgcatgctgccatcaccctaatcatagtctggcctgcagaaccaggagtgaaagataatacatatgtgttgttttaagccaccacgttcgtgaaatttcttaacagcagtagtaggaagctaatatacccgccaagtagagattgattaatttggttaataaacaacaactcctagg

SEQ ID NO: 679 - DNA, 511 bp, Homo sapiens
  misc_feature (1)...(511): n = A,T,C or G
tggcaagaggaaaaacaagcaagtccaactccacaggtttgtaaggagcagccagctttgatttgccctgcacgtcatagctcagaaagttttgctgctcatacaatcctcagcaaagaccatccattcattccgggattcccccagctcatggacacaggtcggtctctaactacagacagccttcttctggaaactctcaccagcctgatttctaaactcccagtccaccttcacattgtttgcctgttttcagtgcctttcctctgcagatctctcagtaggcagccgtaaggagtcagcaaaggctaacacggctgccctcagctggaaacctagtgtagtgcctattacatttctcctgggaaaccccnaaaanccttttttccccccntttttttgggtttgggggaaaagggaaaaaaaaaaaggggggggccccnaaaaatttttttcccaaaaaaaaaaccccctttcccntttaaatttncccttttttttaaaaaagggg

SEQ ID NO: 680 - DNA, 155 bp, Homo sapiens
aaactttgttccttggaccttctgctccacaggcaagagagagaatttgtccaaatacacgaaatggagctcaagaaaacttcatctgattctcaaagaacacacatctcaactgacatctggccccacacttggtaataaaagtgcattggtgc

SEQ ID NO: 681 - DNA, 512 bp, Homo sapiens
  misc_feature (1)...(512): n = A,T,C or G
agacggggtttcaccatattgcccaggctgttctcaaacttctgggctcaagcaatctgcccaccttggcctcccaaagtgctgggattagagaggctttcctccccctggatgatagttgcaccaccatcaacccagtggctcaagtctgaaaagtcgctcaagtcatctttgaatattttcccagctccctacatccaactcatcagctagtccaatgatttcaaagtctaatcggtatcttaaatctgtccactttgctctgtaatgcactgccaccagcctgatccaaaccaccatcttctctcacctttactacaagagcctcctttctctaatcatgccttaaccccagatcagttcttttcccttttttttttgggggggggaaaaaggngtttccccttttggggaaaaggnttttaaaaaaanatttccccttttttttttttttaaaaaaaatttaaaaanccccaaattttnaaattttaaattttccctttgggggaaaa

SEQ ID NO: 682 - DNA, 536 bp, Homo sapiens
  misc_feature (1)...(536): n = A,T,C or G
actgaggtgcagtggctcacctgtaatcccagtgctttgggaggacaaggcaggaggactgctttagcccaggagttcaagaccagcctgggaaatactgcaaaactccatctctacaaaaataaaaataaaaataaatgagccaggtgcagtggcgcatgcctgcagtcccagctactcagaaggccaaggtttctaataaccataagatcataccattggactgtgtgaaaattttcagaactctaatgaagaaatgaatggcttcatgaaactgccaagcaagatcaagcagatcaagaattaattaccgtgaaactgaactgatgaagatttaaagaaactatttctcttaagctttctagagcttgcagagatctggggtcaggccccnaatttttaaattttaaancccttttttttttttttngggnngggggggaaaaaacccncctggggnaaaaatttttttngggggggaaaaaaccccaaaaaattttttnacccccttttttttttttttttccccctttttg

SEQ ID NO: 683 - DNA, 372 bp, Homo sapiens
taactgtgctgaactcatcatactgatttctgggactctggagcaacagatatctacaatggagtctcattctgtcgccaggctggagcgcagtggcgcaatctcgactccctagttcaaacgattctcgtgcctcggcctcctgagtacctgggactacaggcatgcaccaccacgcccagctaatttttatatttttagtagatacggggttacattttggccaggatggtctcgatctcctgacctcatgatccgcctgcctcagcctcccaaagtgctgggattataggcatgagccaccgcacctggcctcaaaaagagctcttgaaatattagggctagttagccttttgtcagtattggaatttt

SEQ ID NO: 684 - DNA, 470 bp, Homo sapiens
  misc_feature (1)...(470): n = A,T,C or G
gagtggatccagaatttgtggaatttaaagcttacataatggctttgagatcccatgggctcaagaaacaaatgaaagagaacatctctgcccagccatagaagaaactaccagactctgaagtggaaccacttataccagtgcatctacaccaaaaggtggaatgagagtggctgcttttctggcagcgtggagacgaacattagaaagaagatgctggatttgggtagcatgaagcagtgaccgtgtgccccacacccagtgagcagcaagaaccccctctaggactggtggagctggaaccatcattaaaggataaactgctcatctcaaaccagaggcaattaagtgacagagggttctcgatccgacgacttcctttccnaaaaggccccttttttttttttttttgggaaacccnaggntttgggggggggcccccccacttttaagggcccccaaaaattttt

SEQ ID NO: 685 - DNA, 540 bp, Homo sapiens
  misc_feature (1)...(540): n = A,T,C or G
agctcctgcttagactnctgnattcctctaactgagnatccanttaaggaaccaatgaacatggagggaggatgaaacctgatgggcatcggggacaaggttcccatgatacagcngcantaanagnctntttngncttccttgctcactgntnaatatggctgaactacgcangnggtccanggagacttggagcagcctgtctgaggncactgaataatcccaganacacatccacnaaactgagccaatactataagcacagaacatttttanaagctgtgggacagaggaaggcccttcccaagatattgcttcgggacccagaatttaaacattcaccattggcttccggtcatgcaggctgtcacatgctcctgaaaaagaagggctgcgtgattttnaaaaanncnnantttttttttttttttttcnaaaaccccccctttttnttttttggnggggggngaaaaagaaaaantggggnggggngntnntccnnaannccctttttttnctnttggggggggggaaaaaaat

SEQ ID NO: 686 - DNA, 416 bp, Homo sapiens
  misc_feature (1)...(416): n = A,T,C or G
ctctgaaagatagttaggatgagaaaacgaccctcattgtaaagatgaagaaaccgaagttcagagaagtcacaaaactacaaagtggcacaccccaggctagaacctccttcctctcatttgaagggccaccaaaccagctgttcccctcatggaagaggagcatagacataaaatgtcaaggcaatggggaaggggcagagaaaaggcacaaacacttggaggagagacagaacaattaattggcacaaaaatacagtattggtgtcaggaggctttggtgggcttggaaacatcaagcagcagatctgaaggaaatccagccctggcatgaaagaaacggggcaggccaggcgcagtggctcactcctgtaatctcaacattttggaangcaaangcgggtggatcaccttga

SEQ ID NO: 687 - DNA, 469 bp, Homo sapiens
  misc_feature (1)...(469): n = A,T,C or G
cctggcagaatctggccaacttggccattnntnttggnccgnggttaactntggnttnntntcctggntntttgtttnggcctgcaactccggttttgcttccttgcctgccccctggcttaaaagaaaaggacggggagtagggatctggaaggacactggcccccaaacagggaatctgagcaccagcagccacgccccagtgggttaaccttaacccgtgcccatgttaaacgcttctgggtggcgtaagcaccgttagctatgggtagctccatggggatcatgttggcatccacctatattgcaagttctgaaatgataacattttanaaatggatggacaaaatggatgcccagggttaaagaaaaaagtggttattaaaaggcnacaccgaaggtccttcaagtggntgnaactggttnataacntgnctgtggtanggnggataccccaatcttccaaagg

SEQ ID NO: 688 - DNA, 608 bp, Homo sapiens
  misc_feature (1)...(608): n = A,T,C or G
gaagaactgaccannacccctttangaacnngngggtcttcaaaaggganaagtgggnancctcaaagtgggggggccaaagggccctttggtttggccacattcaacggtaaaaaaatctttaacggggtcttttaaatggccctttcacgggnccanggaaaccttcaagctttcaaaaagnaaaaacncaaaaccgcgtcaatggctntcatttaaatttncnctttaattcggggcttccaaaaggaaggtgggaggaaatagcttgggtggctcactgtcccaagacactggaagaatgggcantttcaaagaatttttctcttggcaattctgggtcctcttgaaacaagactttggaacctttggtcttgcttgggtttcccaaacccctggggttacnacattnaanaaaccatggtgcctccaagggaacccttcaccntnttgggaagtcttggaanggtttgaagcccccanaggaaaacctcttatggtcttcccattatttttccatttccaanaacaacccttnttntttttttattggaaaaccccnttggngaaaanngggcntttaacttcaanttntttttaaaaacatt

SEQ ID NO: 689 - DNA, 174 bp, Homo sapiens
gttgcctcactggaagccaggacacctatggacaccttaaggcgattttctctggcaagaagtggagatctgatacagacttttcaagaatgtctcattgctttagacaattccctgacactacctgtctggtttctttgattagcaaaaataatcatagtaaaaataccaatc

SEQ ID NO: 690 - DNA, 399 bp, Homo sapiens
  misc_feature (1)...(399): n = A,T,C or G
gaggctcagtccaacagcccttgaagaaaagaattccaccaccaccaacaacaataagcttggaagtggctttttctcgaaataaaaccttcaaatgagacctcagccctagacaccaccttgattatggccttgtgagagagattctaaagcagaaggcccaggtcagctgtgcccagactcctgattgaaagaaactgtgaggtactggccagacgaagtggttcacacctgtaatcccagcactttgggaggccgacgtgggtggatcacctgaggtcaggagttcgagaccagcctggtcaacatggtgaaaccctgtctctactaaaaatataaaaattaacccagcatngnggngngtgcctataattccacttctccaaagcttgaggcaga

SEQ ID NO: 691 - DNA, 457 bp, Homo sapiens
  misc_feature (1)...(457): n = A,T,C or G
gaaagaagcagacaccgagggagaattttaaagacttcaaagagcccgagtggactaccacatccctgtagctggcagtcctatagctggcggtcctacttgtccagtaagcttccaaacattggctcctctctgaaaaggtcaccctgcttttcagacagaatttgtgactctcggcagctgggaatactttggaactgaagagaacctattaggagagagaaaaaacagagtcatgattaagcaaaaaaaaatggagaaaagattcacctctaaattttatttaatgacaacaaaaacacacaacatttctctttgattcataacgttaataaattctacttatcgtttgcaataattccaaggngttctaaaaacatctttatattaaaaaagagttccatattagtttgaattacttcangaaaaaaatggcctattccncccttccaagctt

SEQ ID NO: 692 - DNA, 431 bp, Homo sapiens
  misc_feature (1)...(431): n = A,T,C or G
gggatggatgnggtaccagcaanacttaccaatgagtacctngaccgntcttcatagnagatcccnctggcagcaggccatgaaccacaagcctctntccatcaccctgctttccgggtcttctccagctncacttggtctgatgaataattccaaccagcacttccagaagcttgagctgctctttggctttgataacagctagctttttgggggttacataaacattcacatnttttgtaccgctgttngacaatgactcctggcttctgatnggactgagccttanaaaggatctgggccatnggnatggtnttttttttattgccccncttnggtaaaaaacctttcctncttnaaaatttggggaaccgcttganggngggggcananattttttttttttttgaaggntcttcaaagaaaaaacc

SEQ ID NO: 693 - DNA, 618 bp, Homo sapiens
  misc_feature (1)...(618): n = A,T,C or G
tcagaaacttganggaaaagaaccttgggtcacttaattctncgccntctnggaaaatcaanncttngttatggacctccttgnatngatccnacttgagaccccaccannttnggcccaacccttgcttgggggggaattaagaaaacccttcntcttgtccanaagttaaaggggggcctggaattggggttccaagggtcacatttttttgggaaccttcaanggtggacanggcccagaagccccaaggtncccccanggacaagtggcagccacctttgtnccaangccgggcccttccccgtttcttggcttcccgggcttgaactttccttgggaanaaagaaggaaanggttcattcttgaantttgccagaaaaacttgggaaagccaagaagaacccccaagtttanggaagcctacttaccaacttatttccanggccaaggaaaaagaacaagttgggcctttgggaattgggggaattgtnggtattttggaaaagtngggaagacttaacccanaanggttcctttgggnaaaatggtaccantcntttnttagctttccccaaanaactttgcttgcttnggtgggggaaatggttccaaggt

SEQ ID NO: 694 - DNA, 435 bp, Homo sapiens
  misc_feature (1)...(435): n = A,T,C or G
gaaagaaccttggtcactaaattctacgccttctggaaatcactctgctaatgacttcctgaatgatcgactgagaccaacagctggcccagccctgcatggaggagtaagaaaccctcatctgtcagagttaaggggcctgaatgggtacaggtcacattcttggagctcaaggtgacaggccagagcccgggtccccaggacagtgcagcaccttgtccaggcgggcctcccgtttctggctccgggctgagcttcctggagaagaggaaggttcatctgaattgcagaaactggaagcagagagcccagttaggagctactacaactatccaggcaagaaagacagtggcttggatggggatgtggtattgaaagtggagactancanaagtcttggnaatgtcatnttatactaccaaaacttgctgctgg

SEQ ID NO: 695 - DNA, 282 bp, Homo sapiens
  misc_feature (1)...(282): n = A,T,C or G
taaccagtgaggaactgaggtctcccagcaaccacctgtgtggagttggaagcggcgctctctctctctctctctccagcaaccagtgaggaactgaggtctcccancanccacctgtgtgaagtnggaagtggattccttancctcagtcaaaccttgaaacgactgaaaacctggncaacagcttgtntaaaacctcatgagagaccctaagccanactcncttacctacagaancctttatntgtatctctgaataaatgtntgttattttaagctact

SEQ ID NO: 696 - DNA, 451 bp, Homo sapiens
  misc_feature (1)...(451): n = A,T,C or G
aacgtagctgttttgaaaaaacaaagcatatgcattcttctcaaatggcaacttaaagaaacaggagggcaaattctcatttcttttggaaagtaaagattcctctctttggtaaaagaaacttctttgcattcactgaacaaccttcccttaagagggaaccaacaccgcctgatgatgggcaaactgaggcttacagagatgggagactgcctgcacgggaccattcagctcagaaacagtggaactagaacttgaggccatgcctttcagagctgctcccatcttcttactgtccatgccgcctctggcactttataaatgacagagggtccgatatgggcatcatcacatggttacccatggtaccctaaagtgcagaccccaagcctctcacctggacatctgccacaaaagctgtaatgcanttgaaaattggtcttcccttgtg

SEQ ID NO: 697 - DNA, 278 bp, Homo sapiens
  misc_feature (1)...(278): n = A,T,C or G
gtgttgtgctgatgcaggagacaaccgcgaanatgggnanggaatgagaangatacnncgtanggganttgaagcnaaagatcacgctgcctgcctacaccangaaacagccaagaccccccttgcacgaaccaacattcttccaccctctccaacttttttctggaaccccttcacttncaacgccctcaatgtacacttcactttctngtgctcttcctaagagagtagtgntttnttnctccccaccgagaaaaaaaaataaaagcaacaactgg

SEQ ID NO: 698 - DNA, 293 bp, Homo sapiens
gtccaagattttgagaacccagattcaaataaagaaatagatatggccaggtgcgatggctcacgcctgtaatcccagcactttgggaggccgaggcgggcggatcacgagagacagggtcttgctctattgtccaggctggattcaaccttgtgggctcaagtgatcctcctgcctcagcctctggagtagctgggactacggatgcataccaccacattctgctcatgccctatgtattcttttgtatgtatgggtgtaaaaacagagataaaaacagagatatggatgcc

SEQ ID NO: 699 - DNA, 475 bp, Homo sapiens
acacagcaaaggctgagatttcagagacttgagggctattgggagctcagaacatggcatcaagtcccaaggaggaaaaactatggatcctggaaccttgctgttgtcatacttgggggcctgtcttaaaagtctcacttggtgatatgggctgagtcatgtccctccccaaaattcttatgttgaagtcctaatccctagtacctcagaatgtgattagatttggagatagggtctttagtgagataattaaggcaaaaggaggtcatatgggtggggcctccttacagaggagactggtatctctgtaagaagaggaatgaggacagagacacgtacagaccaagggaccatcatatgaggacacagaaagaagggatccatcttcaagtgaagaaaagaggcttcaggagaaaccaaacctgcccacatcttgatctgggacttttaaccttccaaaatttaaagaaaataa

SEQ ID NO: 700 - DNA, 458 bp, Homo sapiens
  misc_feature (1)...(458): n = A,T,C or G
gacaagattttctctggtcttctgtttcccatttctaaaataatgaaataacgccacttcagaagttcctaacgaggacaaaatgagaggtcatacgccaagtgtatcaagtacacagaaattacctcatttccaaagggaagattggatgatactccacagccaatattgacttactgaagatgttatcaaatcctctgcctttcctcataatgatatgagaagataaagacgtgctccgctacagagtcttcaaaggaagcagaaaaagtataatacataattttaacttaagaggaacactgctggacatcatgagaattccatacaatgagtgtcacatctatcagaaaaccaagggtatgaactctaaagaaatagaagatggtggtgaacagggaccacctctctgcctgatttgntttctgcctaggaggnccttcataattgcatgggtg

SEQ ID NO: 701 - DNA, 523 bp, Homo sapiens
  misc_feature (1)...(523): n = A,T,C or G
gtgcggtggctcacacctgtaatcccagcactttgggaggccaaagtgggaggatcgcttgagctaaagattttgagaccagcctaggcaatatggatgtattatggtattctctggaaagattctgtgaacaagcaagacacctgtttcaggtcttgttaaataccaggtctttccatttcctttaagcctttcagagatttangccatgtcatcatacctgatcacttcatacctgaaccccacaagggcagcagcatcctccggtgtctactacccgtgagaccccctctagagaaagttccagaaaacaagatgagttcaaagagttcataagggacttttgggggaagctacactattattagttaacactgaacagggagcccggagatctagattcttgntgnatttgccctgntcatatgactttggacaaaccactcatcttttaagnaccctcanttcctcanttatttttgganaacattggaagtaaaggacctttaaagtctgtttaccc

SEQ ID NO: 702 - DNA, 475 bp, Homo sapiens
  misc_feature (1)...(475): n = A,T,C or G
gcaaaacagaaattccattttgatgattaaaaggaggaaaaattaacttcatggtcctgacccacgttcaacttgataagagaggagagagcactgtgtgaaggcaagagctggtaagctcagacaacagaaagaccgggactaactcctgctcatcacttcactacacggccttggccatgctgctgatcttcacagcatcaggttcctcatgggtgatttgggaatagcaactggaccaagcctcacagggtccttcatattatttccactcattattgttgaaatcttccagttttctcattattcccaatgcttcaaaataaaagagaaatttagtaagattaaataatggaaaaaggaagccaaagaatatccagttacgatgttcaaagagataagctggccctgaggcatatttatctgtcctaaaagaacttcccaaagagaaaattaaagctnttccaataccttg

SEQ ID NO: 703 - DNA, 527 bp, Homo sapiens
  misc_feature (1)...(527): n = A,T,C or G
ggcatgaactcagggagcgagcttgggaaattgtggaggaagctgtttaaagggattcccaggctctcggtgagccattttggtttctattgtgggacttgtgtgctgttggggcgcccacagatcccacagggctccagccttggcaacgacatcgaccaataccccgtggttttcaggaatgccagcgaccagggctcctggatgcagctggagatgctactgcggaagctctctgacctggtgtggacttcagatgctctaagtgataaggtcaccctctttggatttggatcagaatagcaaggaaagtgtttctatcactggaaggaggataatcagaccaagggctccaaggaaatactgcccacgtctagtgcaggagcagaaatcgaagtcatccatcagctagcgtgtggacaagctcactattcacacaaacttaacctaacttaagtcaatccaantcctatttttgggtgggtaaagggcaggaaggaaaattgtaanancaagctggtactgaa

SEQ ID NO: 704 - DNA, 505 bp, Homo sapiens
  misc_feature (1)...(505): n = A,T,C or G
tatgctccaaccagcagcgcggaccgcaagtggagcccggcaattggaaagttgcaaatgcctggatgctacgttttgcatcttctttagatacccttgactcgtacatcctgtctgggctaatgttgttttctgcttgcagtgtgtctggagtctcaacaagtgcccaagccaccctcaaagggtcactccttgtttcaagagcacttgtgcttgccttgacctctctgtcgctctctgattccacttaggaagctgcttagttccatttttcaactgaaaaattatcctctgcttcaggccactctgtcatactgttttgtgtagtgttttaaagctaatttgaactaggcaatgtcttagccttagatatagacagataattttccagatcagacaagctatagtaaagcttcaaagggaaaacttttattcctaaagagaatanaaaactcatctggggtaatcataattggatttaaaaaatgacccaagttgaattttt

SEQ ID NO: 705 - DNA, 377 bp, Homo sapiens
  misc_feature (1)...(377): n = A,T,C or G
acaaaggcttgctctgtcacctagactggactgcagtggcacgatctcggctcactgcaacctctgccttccaagttcaagcaattctcctgcctcagcctcccgagtagctgggaccacagacctgcaccaccacacccagctaatttttgtatttttggtagaggtggggtttcgccatgatgcccaggctggtctcgaactnctgcctcaagtgatccacctgccttgacctcccaaagtgctaggattacaggcgtgagccaccacacctggcctaattatatctttctattaagccttacctaataatagtaagaagtaggattctctttggctgggtcactattcaataaaatattaaagtcatccatgtg

SEQ ID NO: 706 - DNA, 533 bp, Homo sapiens
  misc_feature (1)...(533): n = A,T,C or G
actcctgcttaagtanaaactgaaactnnttttngnaacntntnttggctngaacntnctnttcangngtgtctgnaagctggcctnattccactttgtgcctggaaaggggacacacangccctggttcctggactgaaagcacgaaacaggatctccctgtgttgcccaagctggtcttgaactcctggctcaagtgaacctcctgcctcntcctcccaaagtgctgggatgacagtgtgagccaccgcacccggnctataacgaaaaagncttgattcncttngcacattgagcctcccctttttggnatctttggnccccaanccctgtagngagaaactgcctgagaaaaaancggnggnnacacantggagaactggaaaaaaaaccccggagtgggaancacatctggtgccccnctccctgacatgaatgtgaccaactctggttttaanatttttgacatntgaagccanaaantnccctttctactataaggggagtggaagggggatttccacactttgtac

SEQ ID NO: 707 - DNA, 520 bp, Homo sapiens
  misc_feature (1)...(520): n = A,T,C or G
tcccacagccctgtgaccaaaagactgggagtgtatgtcaggcctctgagaccaagccaagccatcgcatcccccgtgacttgcacgtatacgcccagatggcctgaagtaactgaagaatcacaaaataagtgaatatgccctgccccaccttaactgatgacattccaccacaaaagaagtgtaaatggccagtccttgccttaactgatgacattatcttgtgagagtccttttcctggctcatcctggctcaaaaagcacccccactgagcatcttgcgacccccactcctgcccgccagagaacaaaccccctttgactgtaattttcctttacctacccaaatcctataaaacggctccacccttatctcccttcgctgactctcttttcggacgcagcccgcgtgcacccaggtgaaataaacagccatgttgctcacacaaaaaaaaaaaggccagngaggccaattcaagcttggacttaaccaggctgaactngntcaaaaggggggggg

SEQ ID NO: 708 - DNA, 508 bp, Homo sapiens
gcctgactcccccgcagaggagaagcaaaacaatctcttagaagcaaatgaatcaattcaccatttcttgaagctgcagagttctatagctggcttggggcaggtgggaaaagaagaactcttctcccattggaaaatctaaggcatacataaatttaatgaagtacaaactttctgtacagatggagcataaacaaatggcgtcactagatccaccagccattcattcaagctgtggacagagcccagcggccgcagcaccggacaactgagtgcttggggaggctcagccctgacagcccctgcacaacccaaatcagttggcaggtcacagaggtgaggccaccaagggcttctgacccttgtggccctcccagggctaccctccttgagtccatccttctggtcaaccagcttgggagccttagtgagtggcagggttgttgctagagagaaagccctggagtcttctctgctctaatgacttaaaataaagtccaaactcctc

SEQ ID NO: 709 - DNA, 229 bp, Homo sapiens
ggaaaacaatggagcttcctgacatgtgacactgatgctgtttcactcaacaagcaaaagtcttgctccttcttctactggaatatcagtgccatgagagctgggatctttgttttgatctctgctttgtccccagcacccagcacaatgcttgacacatagtaggtgctcaataagttccactgaatgaatatacacaaccaatcctgataataaaagtttgttattg

SEQ ID NO: 710 - DNA, 298 bp, Homo sapiens
  misc_feature (1)...(298): n = A,T,C or G
gctattgtcctccagttcctagcttaaaactgtacgggacatttccagtatagagcctgctgagaatgaacatgaaatcaaggacatcacctgatgatggattatgtagatggcgaaggtgtggtggcacggagacctcttggtgaccaagccggacactgagcaatctgtcagcagcttatcaaaagaaaacacaagtccaaactttgtangaaaatacctgattaaaatcactctttcagggggtatctagtacatctggcaggccagtctggtatttaataaatcctgctccttc

SEQ ID NO: 711 - DNA, 299 bp, Homo sapiens
acaaacaatgattcctgaagaaataataatgaaccatcacctttgatgtaatggctgcctgcactgtcgagatgggagtgtgccaagatcagagattaatgcatattaaagaaggtgaagagaatttcacttctggatgatgtgagcaccctgcagtttgctgtgtacttttcatacacttatgtatttatctaaaaccttccatgatttttttggtgcagtagtatacagaatctgaactgttataaggtcaactgtaaacaattatctaatagttattctaaaactttacctccaat

SEQ ID NO: 712 - DNA, 435 bp, Homo sapiens
  misc_feature (1)...(435): n = A,T,C or G
gttctgtgctctgtctttcctctanccctcagcttaataggttgtgaccaaggcaattcaaggaattgtcccaggggaggggaactggtggaatgagtacctggcaaaaggaaagcagttgtcatgactggccaagactaaaggtcagaagactttcactggagatatccctccctatgcctggaagaaaggaatattcttatctctgaagacattgggaaacacaataatagctgaaaaacaggccttgctaacttctctccagtttattattagatgatatatttttatccaatcatatttctccatcactacccacttctccatcagaactagccttaaaatgcataggtttacatattttttagtcttcatttccacagttcccttgtcacactaaaactatattaagtaaatttatatgtttttctcttg

SEQ ID NO: 713 - DNA, 334 bp, Homo sapiens
  misc_feature (1)...(334): n = A,T,C or G
atacctatctntagtctattcngatgacaaagtcaataacaggacatttaagagtcacagctctgaaaacaacataaagcatcatgggccgtgctagacatttaaatgcaagagccattctcttcaaaggactatgaagacttggaacaaaacatcacagtcattcctttgtactctggatgccgaatgttgcaatactgtctgcccgcgaacctttccattcttacagcaaatcactcgtccataaagacagactgtagtgattctaatgcttctgtaaaatatctacttattggcactgcatcagaataaatttaactttattttaaatgct

SEQ ID NO: 714 - DNA, 567 bp, Homo sapiens
  misc_feature (1)...(567): n = A,T,C or G
gagctggggatttcaaaacngccccgggcatcatgcctccggcntaattttcntatttttttgaagaagagnggggtttcacnatttttgccccacggctgggtcttgaactccnnacctcaaggtgattcccngccnttggnctctcaaaagtgctggnattacagggcggngancccacccccccccaaccaaaaacgtttttttttcttantttacccgccgggggggaaaagaaagatttatttttggggnttgctttttctccccttggaaggaacaagaaaaggnttcccttcttttcttgattnttnaaaagnaaaactnacttnacttggnggtttttttttttttttgcccctcaaaaatttgccctaccccaagttnnctccctggcaaggnttttttttntttnttnaataaaaanaagcattggccnttgtnttttcccccccccttttgattttttccngnccccttncttngncccttaaannccnttcaaggggggtggnngttnccctttttaaccggggaacccccgantttccaaatttccttttttgt

SEQ ID NO: 715 - DNA, 652 bp, Homo sapiens
  misc_feature (1)...(652): n = A,T,C or G
cacttctccttcctgcccttgtatgaagaaggatgtgtttgcttccccttgtgccatgattgtaaatttcctgaggcctcctcagccctgcagaactggctagagcaatgtatcttaggctcacttaaggaagctgtagagatgagcccaaggagggaaaccagaagagccccccaggctcaccagttgtttgttggctccctacaaacatgtcattcaagtggctaatcttacaacagcacaaattcatctaaccagagatactctattatagcaaagaagaaagataatttcattgagccatcctgttttacaggattttccctcctggtgagtcaaaatgaacaagaagtaccccaggacctcccttccctccttggcattaatgagatgaaggcaattaactcacatagtataaatgaatcatttgaggtgatgactgcattttaggcaaatgatgactttcttggtccattggtttgcaagtaaaagttacacacattgaaaagacactgaaacagatttcctaaatgcttcattttctggatgcaccaatggtgacctactatacatggtaaatggntttaaaatatcaccttaaaaataaaangaaacttncagctactaactcagctcttgatgggctatgaaa

SEQ ID NO: 716 - DNA, 485 bp, Homo sapiens
gagctgattcttcttaaaatgcattgccacgttatctctaacgttggctttctgacttccccgcggggctcggaggaagtaacccagtttcttaaggaaaaatgagagataaacatcacaacagaattctaatgacactgcaacaaaatcaggccaaaatgaacgaaagaaagaaaagaaaagagaagagaaggaaaggaaaagaaagaaaagcctttggtgcttgctcactacaaaatgaacaaattgcaagtggaaaggaaaatgtttccttttttgagtcccttcatacctagtggaatttggaaaacttaggaatccttcaataacaaacactttgccaagtgcaaggacttggaatttcttctctactgaatctactgaaccatgggtcttaattaggtgaaacagcatcacctacagtgggatttggttgggacccccaagtcaataatttgattgaataaagctctttggaattttcc

SEQ ID NO: 717 - DNA, 667 bp, Homo sapiens
  misc_feature (1)...(667): n = A,T,C or G
gatggttagctgggcaatcaactactcagaagacgatgacatttcccagtcccctcatagttgagctgcaggaaatggaagcagttgaatgtgaatataaatacggatgtccttagagaactgttgtcataaattacatgatcaggaaaagagcaaaacaatacaaaagatcataatctcaaaaatctcctattgccatcgcagaaaacagatccatcagacaacacgcatcccatcctctgattcaaagaagtgatgctcgtttgtattaacgctcctccatgcatagaagggctcagcaccacctaatggtgctatattaaggatcatccaaaccaggtcaaccttctgagaggttcccagtcctggagacaggtcaaaagtgaagctcagactggtctggcacttatacagccattaggaagagatgagcagaaaagctctaagattccacagcccagactggctatggatattaacgacctgcctccaaccatccatacctgttcttttgntaatctggttttaccaccatgcaagagagacaaccaaactcatacagtcaaaactgagtcataagaccctctnccaattttttattttttggttctacttataattcttacttttatacttctaaaacaattctattccctggtaaaagact

SEQ ID NO: 718 - DNA, 679 bp, Homo sapiens
  misc_feature (1)...(679): n = A,T,C or G
ttctggaggctggagagtccaaggtcgaggggcctgcatctggcgagggccttattgctgaatcatcccacggcaggaggtggaagagcaagagagagcgagggcatgcgcatgtgaacaagagaaagagactgaatttgcagcctgaagcccttctatgattggcattaatccattcacaaaggcagagccctcatgacctaaacacctctcactaggtcccacctctcaacagagttgcattggggattaaattcccaacacacgctttttaggtgacattttcaaaccatcgcaccttcctagtgcccataggccaggcactgtttctggggacttctgggaattaacacagtaatcctcacaaccagcccatgaagtaggtgttattgttaccacctccatgtcagaggttgagaaacggaggtgcagagaggttagttagcatggtgtctggcactggcatctatctcttactactacacctaattgctcaaaaattttgaangcttccanggcaagcgacatcacaaatgccagcataatagcaagtagattctttcaaagacatgaacatataggaaaatacaagntttactcaatttctcaacatttttcaaactggggtccttggatttgggtttggggtaaaaattaaaaggangggtctattgccaag

SEQ ID NO: 719 - DNA, 592 bp, Homo sapiens
  misc_feature (1)...(592): n = A,T,C or G
atggatagctctctgaaagcgggaagcatgccttgttcagggagaagagatcttgctgacccaccccttctctttctttctgacctgaatgtggatatgtggtttgcttctgtggctgcaatcaggtgacatgaggcaccaaccattggaccaagaagacaacagccaaagacagaagagcagaaaaataaaaggaaaaggcctgtgttttgataacatcaatgagcagcagtaccagtgccaatagtcacctgtctccagccttcttgtgaatgagatactacaggtctgtattgcttgagccatttctaactccagaatatatttaagagtttcatactgaagttgaaccacacatctttctttgaacttcctaacaggcaaaacaactgcataaaagagatactcaattaagttattatttgcattgnctttgaggagaaaattgatagttcttcaagagaggcactggttcttgtgaaacttaattctttaaaaaatggcttgggtggggcatcataaaaagacactgagntatgggggnaactgnatttaaatcatatccccaaantaaatgccaaaatagtttcat

SEQ ID NO: 720 - DNA, 316 bp, Homo sapiens
  misc_feature (1)...(316): n = A,T,C or G
tttttccggcaagngacttganaagtngcnnccngaaagggnggcggtggcttgcccanacncggtggggaagagccttgagggtgcttgccgccccaggtgacangacccgaagattgtacnanancactctaattgcncnaaaataggcactatccaccaaacttcctggccttgagaatngtttaccaanaacttcaaagatccctcttgcccacatcttgaaaaangccccccttccctataaaaaaatcanggacccccttgcttaaagnnaaacaantgccccccttgtnaaataaaattgttggaaaaa

SEQ ID NO: 721 - DNA, 184 bp, Homo sapiens
  misc_feature (1)...(184): n = A,T,C or G
gcaccgngancntcactcattnncgannnctgcattgttgttggctgatgtcatagactgttcctctatgatcacaagaattccctatttagaactgcatatgggtgcccgttgggtaacngtttcaagttgaaagaattttgcattttgtgttattgtactagaatgaaataatcttaatccg

SEQ ID NO: 722 - DNA, 592 bp, Homo sapiens
  misc_feature (1)...(592): n = A,T,C or G
gactctggggagctcctgcattaagtcagnaactgnncattaccaganccnagcgagcttntgacaatcgcncnntagcccttcggctgcaatcattctttccgtcagagtcatcatgagctgacgggctttggagctggaacacttaaactggtccacaagaaagtgctggatgtttgccatctgtttccagaaagcttccatctgtgaaatgagcacaagcagcaagaagtgaggtgaaaaacttacttaagaaagccaaacggtgcgtgcttgggaattacaattcactccttatcacaaacaaagattctaaacaattctacagtttcagtgagtttatcttggcaacaatcaccgttctacagtgaagttctttctggttccattgnctggttccagtgtcaagtcagttttgcaatggtgtttcagcagacacgagagcactgctgctaaggaaagaaagcagtagcttgtccagcctacagactcttgcacaggtcattacagctacctangggctgatgaaatgtgacaatgggctcatggaagctttggcaattttaaatgggattaaatactttcctgaagt

SEQ ID NO: 723 - DNA, 167 bp, Homo sapiens
  misc_feature (1)...(167): n = A,T,C or G
tctggggagctcctgcattaagtcnactgnnatcctaaacgaaggcagacatcaacatttctggattcagggtccagagtgctcaccattacaccatggaacctcaaaccagacatcaacgtctctaatgagtctttctttattccaataaaagaaaatggtcagtg

SEQ ID NO: 724 - DNA, 477 bp, Homo sapiens
  misc_feature (1)...(477): n = A,T,C or G
gaacaagctgacattttataaaggaagcacagttgactcttggacaacacggatttgaactgcacgggtccacttacacatggattttcttccgcctctgacagcaagacaaactcctccttttccgcctccttcacctcagcctattcaatggtaagatgatgaggatgaagacctttatgataaagaatagagcaactggacatcagcaaaaaagtgaatcttcaccaaaaactcccaccttatacaaaaaattaactcaaactggaccacagacttaatgtaaaacataagactataaaactttcagataaaaacagaagaaaagttttcaggacctagagctacaaaactagttcttagaattgatgccnaaagcnccaccccccaagaaaaattaattgggnctttttcaaagttaaaancctttgntcaccaaaagaccctnttangcagatgaaaagagtagctgcagac

SEQ ID NO: 725 - DNA, 188 bp, Homo sapiens
gaaatctggaccatctgctggggagaaatctgtttctttgcaggataaaatgctccctacaaatgtaaaagcttttatatcccaggactgttattcaaagcacctttaagctcagcttcttacagcgccgtctgaaaaaatacaaaacaacagctatgtcttgcaagtaaaatcaatggtttcctcac

SEQ ID NO: 726 - DNA, 682 bp, Homo sapiens
  misc_feature (1)...(682): n = A,T,C or G
aagggtctgcagagtctgcaggtggcgcgcacattcgtcatgatgctgaagagatgagcagagtgcttagtctggggcccagcgcactcatctggaagcatgtcagcggagccgcgggacagctgccacggacggcagtggccccggattcatgtcccgagtctgaagagagctcctccctggccttttggtttttggggcctcctagtgtcctccccacacttcggtttaggtctctgtcttgcagcatcagcgactcccacttcttttctggcagggctgtggctgcagacagcatctccagctagttcacaggtggccgccctaggccacgggctttccctggggatgaaggaccttcaaatggaaaatggccactttcataggactgtttcaggttacagggtcaccccttcctgtccctaccttagactcccaaccccatcgctgcacctggcctggcctcctctggaaggaagctcagatttggagcctctgcagggcagggagcctgttggaaccagcccanggccagccggctcattcctggaattcctacctcctctcactgccctgggtttggcaccangtgctgagtgggcctcangccaactgtgggcatgggctcgatgccgctgctttcttcttcacatcaaggnattcagccgnattctaccccaaa

SEQ ID NO: 727 - DNA, 663 bp, Homo sapiens
  misc_feature (1)...(663): n = A,T,C or G
tgattggctctttactggaaatatgcagaagtgactccctcccagaaacagccttgactggtgtcattccagcctcacttcaagggcagagacctggttgtcagtgagatcatcacagccacagaggaccaagggccccaagagagtcaacatgcaatgtcagcaatgcagtgccttaaagaacatctgtctacccatgactaccacagtggagaatgaggaaattgagacccatagaggaaaagtgaactagtcaatatcaacccccaagttagagaccaagggtaatggagaaactttgatgagagtatgggctgctggtaactaacttgtggactcaagggcctcacaccctcaaggtcggacaacttccccaaaatgtcacattctgagacaggttaaccaagggcttgggcctctgctgctgtttcctcttcctttcaaaggcaagcaccatggataggcctgctctgcagctccaacccctggggtccccagggtcatgctcagtgcaattcttctttctggctggacacttggagcttgatgttccccagagttctggtcangctcttnccatctctttgcctgaaaagaaactcaaggccttnccaagtgggagccatcaccactggatggncagcacccaaatctcacccccga

SEQ ID NO: 728 - DNA, 580 bp, Homo sapiens
  misc_feature (1)...(580): n = A,T,C or G
gnatcntccncttnggcntccnaannnttngggatcccnccngtccntntcagactgttacaactgaagaaagggccctcggagatcatccagcccatccccctcatttcacagcgaagatgtgagctggaagcttcacagaaacacacagctcccaggcttcagtaagtaatcatgtagtgggttgttttttttctgtccctgagaagctgggagtaggtccttggatgcattacagatcaagagacaaaatggaacagtaattatgattctgaaattgctcataattagatccacagccaggcagtctcactcagattaatgagactgagtttctgattcccagtggcccataggtcagtgaaggttcaagaggtgctaattagatcaatgagtttttttagttattcatttgataaagcattgcatggcactgtgtgcaaagctctgagctaggtactgtggctgataaaggattactatatagtatgaatctgtgtttaagaaaaagaaccccccagaacctgattgcctggggatagaatccnatctttgntcaagttgaatgatgaagaataag

SEQ ID NO: 729 - DNA, 278 bp, Homo sapiens
  misc_feature (1)...(278): n = A,T,C or G
gggagctcctgcttagtcagactgaggccctgccttcgatggatcaagctggcacccccagatcaataaactggctcatctggtcttgnggcctccatccaagtaccaactcagtgcaagaagacagcttcgaccccgtatgatttaatctccaacctgaccaatcagcacttctactccctggccccctacccaccaaataatcctcaaaaaaacccagtctccaaattttcaggaaagactgatttgagtaataataaaactctggtctcccgttc

SEQ ID NO: 730 - DNA, 700 bp, Homo sapiens
  misc_feature (1)...(700): n = A,T,C or G
tttaagtactctggggnnctancctgcctttnngncatcaatttntttttttttngaaatgggaggacctttttcaacgacnctggtttgntttgtggcgtttcctttgtgggaaccngnngntctttttngttngtgagaaanttcngngattccttggaattttcncttacttttnctttgcntggtgnatncctttattgggtngccgggctggganttttttttgctttttaatncnattgtggtggtcttcnaaangaaaaccncttttagaagggcaaanaaaggcccaaaaaagccnattattncctgggntttcttcctttccnnggaaaaaggggaaaaaaaggacccccccaagccanggggccaaaggggggacccnanaaaccccgctcaaaggcccanccaaaaaaaccttnggccaaaggcccacccaangggcccnagcnnanaagggggaaaaagaaaaanttggaccttttgnaagggaagggcttnccttggttgttnttggaaaaccgggcangttggtattttttaccaaccaaattattgttttcccacctcttctttccctttgnctttcttttttttgggaaatgggggtttttcnttttttcccattttttcattttacccaccctttttggcntttgggnaaaaagaaattggggatttaaattgggattttctt

SEQ ID NO: 731 - DNA, 353 bp, Homo sapiens
ggtcttactctgtcacccaggttggagtgcaatagtgcaatcttggcttactgcagccttgaactcccggctcaagcaatcctcccacctctggctactgagtagttgggattgcaggtcaagccaaaaagtgatcggccattcttttaccgggttccagccaactctgtccgctaacccctatgacagaggagatgggaaaataattgagctgctacctaggaaggcacaaacatttcctgtggtgaggacttaggaagcagtgccaggaatcgggccatcggaaggcctaagcacactgggcacaggttttctgcccctagcaagggactgacaataaagtcaagtgaagc

SEQ ID NO: 732 - DNA, 266 bp, Homo sapiens
  misc_feature (1)...(266): n = A,T,C or G
gttagtgacntcattatacactcgagccagaaatctctccaactttttcatgctactcattcaagcaaccagacatcaggttccactactatcttcttcagaaaagctatccagatcaaagcagaagcccaactctcttctgctgcgtttcaacagggactgcttacgtccagatcatcccagaggattcctgtgttagctctattagttctaccttccttgagaactgctacatagctaccattcaataaaataaatctcagcgt

SEQ ID NO: 733 - DNA, 679 bp, Homo sapiens
  misc_feature (1)...(679): n = A,T,C or G
cacacagcttcctgagcaactttccacctccccattcatgcctaacttgaaaagtgtgtgctgaatgtggatggacagtcattctagggcagaagccatggaaatccaaggactggactgaagaagatctagatgccgcatctctaggctatccgtctaggctatccggctgagacaaggccttctgcagcccagctcacatatggtatatttcagccagcgagagctcaactaactgcagaacatccagcactgcatgtcatatcgtgtcacccacttgctgagggcaagcccagcatggtttggtctgaagctgacttgaagagctgagagttcaagacttgtcactgggtcccaaaaaggccctgtgagcctggaggcagagcccagtcctgtctcaaccaccaggctcaggactgggggctttcccgaggatagagtnacacccgcgcgcgcacacacacacacacacacacacacacacacattcattctgtttgatggnggagctcctttcttatggagagacacttttcaataaaaagaacatatagggtgcttnttctgcaagctgcactggcctttcgctaccccaaaacctcttctattcagggagtccctntntgggntgggagcaccaacactggtcttaanaactccctggcattactttttccaa

SEQ ID NO: 734 - DNA, 375 bp, Homo sapiens
agtctcgctttgtcacctatgctggagcgcaatggcatgatcttggctcgctgcaacctccgcttcccaggttcaagtgattctcctgcctcagcctccagaagaggtgggattagaggcatgcaccaccacacttggctgatttttgtattcaccatctctaccaggccaggctggtcttgaactcccgacctcaggtgatccacccacctcagcctcccaaaatgctgggattaaaggcgtgagccaccatgcccagctgctcaacatttcaaacagaagtttaattatgaaaagagaattaaatggcaatttttaccagtaagacataagcctaacatcattgactgagagaagtaaatgctgtcaaaagat

SEQ ID NO: 735 - DNA, 232 bp, Homo sapiens
  misc_feature (1)...(232): n = A,T,C or G
tcctggcctccttcagngagatgttgagtaggtttagccagaatccactcctacccctgatgtttcctttcactgaccgtcccgccacgaccactcctgggctgtaaatcctcacttgtccttgctgtatttggaatggagtccagttctaaggttcaagagttctaagagtcctgagggctcatttctcctattgaaatagttcctgagtaaaatctgcttttatggctct

SEQ ID NO: 736 - DNA, 571 bp, Homo sapiens
  misc_feature (1)...(571): n = A,T,C or G
actgagccaaagccaaaatgaacatgtgccttgtactaagaaatcccaggattgtcacaacttgtgccagctgttgaggttgtgacacctgtgccagcatcgccggctctgcccactgtcatctgttccaactgttccatctgcactgtttgtaccaattctcccatttctgcatctgcaccttctgcagaaacgtttccaacaatgccagctgtgtcattggtgccaaatatgccagatgttctatttgtccaccctgggccaaatcaatgcagttttgtgctcattagttttagctggtagattctattttacaattttttgatttgnattttgattgaatccaggcaaaatccccctttcaaagattttgtgtctatctatccatctctttgcaaccccaactttatatctgacaacatgaagttggtcaatgttattcccgatcttattaaaccancccaatattaagtgngggtaggggcatttcctacccgtgtnagactatatatcgcaaaaaccatgcaacatagggataagttggcaaaagtnanttaaaaaagaatacact

SEQ ID NO: 737 - DNA, 468 bp, Homo sapiens
  misc_feature (1)...(468): n = A,T,C or G
tgggctcctacctcnagctcctgtgatctggtggtggggggccacccaccctcctgcttcagtgatcaagaactgaccaagcttgctcatcccaagcccccagccacaagcaataggggatcccggtaaaggtttgccgacctaagctggtngtgatgaagccatcaagatgatccctctttctgtttggagggtgctaaatccggcaggggccattgaagcctgggatttactaagcaagaagccttgccttgaaagatgccaccaagcacaagaagatgggccaaaaccanaggagcctaagaagaagacangaatctcaagttgatgatatcttgaagccatccaagaattccagcccaccatcttgaaagtttaaaaagtcttgctcaagggactcttgagggtacaagggaagggtaatacatttttgtatcaagggaaattggaaagtgggggcttcttttt

SEQ ID NO: 738 - DNA, 146 bp, Homo sapiens
acccaggtgaccgctcacctccccttcctcctggagccttgaagtcggaggccctgagccatggacggtatctgaggatcggtttagcgtatctggccggagaaattggcaacatttgctacgaataaaacccaagcgtttccagc

SEQ ID NO: 739 - DNA, 693 bp, Homo sapiens
  misc_feature (1)...(693): n = A,T,C or G
tttctcacaggacaacacctgtcatgtgtcaacaactgtgtgaagaatgacaaaaagacaataggacaagctcatttcctgagcttgtagccgcagaattgggccaggtgcttttaatcctcacagctgctctgcaagcctttgccctgcttactagactgaaaatcatgataaagctgagactttccctgactcacctttgaatcctctatgaatctgccgagctaagaagaccacctgacacttagtggatactaattcaacagtgtgctgacccagtatgcaaaggaccatgggcaatactctgtgtgtgtgtgtgtgtgtgtgtgtgtgtgtgngccctctcttgcacactttgcaaagcttgaaaanggaagtangcantgaccattttatatattgganaccagcgtatatgggaaantgangcattaagaagaaatataacntgctttaaactacacatcaactgnantggcanaactcggagntagatggatgagattntgcccccacaagacttacaaggtgtntgngaaggngttnctgnaagaaantancatttnaanncanctgnngggagnaaanaaaaacccctntgncatngnagnnggggcntnatccancccggngngggggcaaannnaacaaacanngggcnnngggaaaagcnanntttttttttaaagtttg

SEQ ID NO: 740 - DNA, 181 bp, Homo sapiens
  misc_feature (1)...(181): n = A,T,C or G
tggggagctcctgcattaagtcagaactngaggtggaggncccnncattcntccanaggatgcngcancaagacaccntnttggaagcagagcagccctcaccagacaccaaatcggccagcccattgatcttagacttcccagcctccagaactatgaaaaataaatttcttttgtttat

SEQ ID NO: 741 - DNA, 689 bp, Homo sapiens
  misc_feature (1)...(689): n = A,T,C or G
aaatatggaattcaaaaggtcattaagaanaaaagaaattctcaagttccttctgaatttctaataacacgggaaatgaggcttcagtgctcaacatgccaacatgcttggaaattcttcaataccatgacctctaaaagcccagctaatttagtgaaaagagaaacaagggtcctgcataccaatgaaactgctgacatcagctgatctgaatgacccaacaaaaagcttacatacacaaagaatgcagttttcacatcctaatcatttcattctccttaccctgaccaatcaatgatcccaatttgccagtcccataccctccacaattttcttaaaaaccccagatcagtatattccttggggagatggattttggtgttttctgccatctccttgcttggctgtcctgtgatctttaaacactttttctgctgcaaccctgctgtctcagtgtacggatatgttactgtgcagagggcatatgaagctgttggcctataatattatgatggcattagtggccttataagaattaagaagagaagccnggcacattcgcacgcacctgtagtcccagctactcangangctgaggcaggaggattgcttganccccaggagttaaaggctgcagngggctttgancatttntttgannanccactgnactcttacctgaacaacca

SEQ ID NO: 742 - DNA, 401 bp, Homo sapiens
  misc_feature (1)...(401): n = A,T,C or G
ctggggagctcctgcattaagtccacctgnttgagtacaangntgnggncaacttttactgttcttaccattgaaaaagaagtgctgaggccaggcatggtggctcacacctgtaatcccagcactttgggatgccgaggcagctggatcacttgtggtcaagagttcaagaccagattgggcgacatggtgaaaccccgtctctactacaaatacgaaaattagccattgtggtggcacacgcctgtaatcccagctactcaggaggctgatgtgggagaactgaaccctggaggtggagattgcagtgagccaagatggcgctactgtgctccagcctgggcaacaaagcaacactatgttttaaataaataaataagtgctgagatctcagaaaatac

SEQ ID NO: 743 - DNA, 446 bp, Homo sapiens
  misc_feature (1)...(446): n = A,T,C or G
gtgtcaggcctctgagcccaagctaagccatcatatcccctgtgatctgcacctacacatccagatggcctgaagtaagtgaagatccacaaaagaagtgaaaatagccttaactgatggcattccaccattgtgatttgtttctgcctcaccctaactgatcaatgtactttgaaatctcccacacccttaagaaggttctttgtaattctccccacccctgagaatgtactttgtgagatccaccctctgcccgcaaaacattgctcttaactccaccgcctatcccaaaacctataggagctaatgataatccaccaccctttgctgactcctttttcggactcagcccgcctgcacccgggtgaaataaacaaccttgctgntcacaccaannnnnnnnannnnnnnnnnnnnnnnnnggggggggggggggggggcctttt

SEQ ID NO: 744 - DNA, 500 bp, Homo sapiens
  misc_feature (1)...(500): n = A,T,C or G
gtgatcatatgaatgaatttaatgtttaaaaatcacctgacaactacttgcagggggtaaagtggaaagtgggcaaggccaaggtcatgctacagaatgtgactgagcaacagggggatcacttcagctgggatgggaaaggaaagcctccaggaggagttgacatcgaatcacagttgaatcctaanaagtcagtcttgcaaagatctaggaaagaaacagctaagtttctaaggtgcccagatttcatattgctcaaacacacatgctctacaaacaatttatacagacaacggcaatcatcaccaggatcctggagacgagatacatcctcagcttangaaagaagacggggattaaagaagattaaaaggacccnggnctttcggaaaaacttttnaaaagtcctnnntttggnaggnaanagnnaaataaaanggtcccatggnaaatcttttcccaaatttanttntttcaaaagactngcaggtaaaagaaca

SEQ ID NO: 745 - DNA, 495 bp, Homo sapiens
  misc_feature (1)...(495): n = A,T,C or G
gtgctgtggctcacacctgtaatcctagcacaccagccgaggcaggaggatcacttgaggtcaggagttcgagaccagcctggccaacatggtgaaaccccatctctaccaaaaatacaagaattggccgagcgtagtggcccacgcctgtaagtccaactactcaggaggctgaggcgggagaatagcttgaacctgggagacaaaggctacagtgagctgagattgtgccactgtactccagcatgggcgacagagtgagaccctgtcccaaaaaacaaaacaaaacaaaacaaaacaagacttatttcaatggacttgtcccctctgtgtcatcattcaatcatctctgtaagttaaaatcctgngggnggggacaacccnaaaagggggggaanggttttaatttttnnccttttgaaagtancaaaaaggggacacctgncantgggggaaggatttcaaaaaagttccccatgcccttcatgaagtttt

SEQ ID NO: 746 - DNA, 469 bp, Homo sapiens
  misc_feature (1)...(469): n = A,T,C or G
gctcttccccagtctggagtacagtagggtgttcttggctcactgaaacctctacctcctgggtttaagcaattctcctgcctcagccacatggagtattgctctgtggcccaggctggagtacaatggcgcgatcttggttcacagtaacttccgcctcctgggttcaagtgattcccctgcctcagcttcccaattctggaggctggaagtccacgatcaaggtgccagcatggtcagtttcttgtcctggctcataggccgcccccatcttgccatcttcacaaagaagaggtgtactcacgtgacctctcctttgtgcacaagaggagagagtgagcaagtgaactcttggtgactcccctacaaggacactaaccctattnttggaggggcccccccctgggaactnnnttnaacntaaatacctnatttaaacctggctccaaaaacagcccattggactttg

SEQ ID NO: 747 - DNA, 469 bp, Homo sapiens
  misc_feature (1)...(469): n = A,T,C or G
aagcgcctaagaaatgcctgtgacgttcgtgaactatgtgattgtgaattccaaatttgatgccaactttatgtgtaaagaagctaactcctgccaacatcgtggctgaatgaacagctgggactatgcttaacccattcccagcttataaaagccccatggcagctgcagtgaagcatcagattatgtgatgcaacaaaattcaaatatgaaaaccatcttggaggccgggcgcggtggctcatgcctttaatcccagcactttgggaggccgaggcacggtgcctcacacctgtaatcccagcactttaggaggctgaggcgggcggatcacctgaggtcgagagttcgagaccagcctggccaacatgaanaaactccatttttttcttaaataccaaaaatttncccgccttggggnncatgccttgtattcccacntnctcggaaggctgaggcaggaaaattg

SEQ ID NO: 748 - DNA, 79 bp, Homo sapiens
  misc_feature (1)...(79): n = A,T,C or G
acagggaattttcnttgtgtacgnatcataggtgactatattacctgtccaaantgaataaaacanaatttaaaaagcg

SEQ ID NO: 749 - DNA, 251 bp, Homo sapiens
  misc_feature (1)...(251): n = A,T,C or G
tcccccaaccttggaaatngccaaccggcnccaancaattggntttancttgcaaccctccaaatttcctggggcttcaaaaanaccttttttttaaaccttccccaancaagctgggggaactacaaggcgggggccnccactttgaaacctcgggcttaatantgggaaggtaatttactaaagtatcttgnaaaaatccttaatccaatattaaggggaaaaataaaagggtttttttaaaatgggtt

SEQ ID NO: 750 - DNA, 487 bp, Homo sapiens
  misc_feature (1)...(487): n = A,T,C or G
gaggaaagaaggcggaagcacgaacggcttaattaggaagnccnncncttanttggacctccccactggaaacacccacnttgaacaactattcacacaaagaagcaccttngtaagaaccaaaaatcaggngccagacagaaagnnatntntntgctnaactganacaaatgcacnattcattgagccagactaaggcataagngactattcctctatgttccccaacatgtaaattgtggattcagggaaaggctgattgaagagtcattaagaatgtagcatttttgngttttatttcctggaaccacaccttatctanctggaactgtcccctccccgccccnccaattctgncntgttttgagagntcctgcctttctggaccaaattnatnggccttttnnacccanggggggggngggggaaaatttccctaaaagggggaaaagggagcggtnccctgccnncttgagcacatgttgcc

SEQ ID NO: 751 - DNA, 148 bp, Homo sapiens
gtgaggacacagcaatcctccagaggatgcagcaacaagacaccatcttggaagcagagcagccctcaccagacaccaaatcggccagcccattgatcttagacttcccagcctccagaactatgaaaaataaatttcttttgtttat

SEQ ID NO: 752 - DNA, 455 bp, Homo sapiens
  misc_feature (1)...(455): n = A,T,C or G
cttccagaggctgcctgcatcacttgccttggggccccttcctccatcttcaacaggaggttgagttcctcatcacataacatcactcggaccttgtcttctgcctcgctcttccacttctaaaagccccagtgattacactggactcatccaaataacccaggatcatcatctcctctccaggatcttgttctgcggcccaggctggagtgcagtggcttgtggaaaactgaactcatctttataattccttttttattgagacttacctagaataattaacatttgaatttaattaaaaacagttcttttgtcaaacttaacccaattctccaatacttttgtaggtcaccttctttaataacaatcagaggaagaattttctgactctttaaaaaaaaganctaaaaaaanaanctttatngccancacataangcnttttttttcgggccc

SEQ ID NO: 753 - DNA, 433 bp, Homo sapiens
  misc_feature (1)...(433): n = A,T,C or G
atgttgcttgtattagtccattttcacactgctgatgaaggcatacccgagactgggaagaaaaggaggtttaatggacttacagttccacgtggctggggaggcctcacaatcatatcagaaggtcacagctgatgcaagaggcaggctcccacagccttgagcagctctgcccctgtggctttgcagggtatagctccattcctgactgctttcgtgggctggtgttgcatgtctgtggcttttccaggcacacagtgcaagttgttggaagatctaccattctagcgtctggaggatggtggccctcttctcacagctccaaattatatgctggatatacaagagactcatgacccaaactgggacaacaggaatggctttctggganaaaanaaatttgggnccccaacccngaaaaaaaaaaacccgg

SEQ ID NO: 754 - DNA, 74 bp, Homo sapiens
  misc_feature (1)...(74): n = A,T,C or G
atacctcaaaagggagttgntttaatgtctaacaacacagaaggaaataaaagtgcctgtgattaaagtgcttt

SEQ ID NO: 755 - DNA, 390 bp, Homo sapiens
atgcatttgtcattgaagaaaaacatcttacaaaggaagtttaaaagagaacccagatgaatatttcttcagatgaaccacaaataagttctgatttcaacatgttctacaactccccagagctgagaagctaaagacggttctacaatatcatattccaaaggcatcacagggtttagctgctaatgcaataaagtggtttttgtcttggaagcacgcaacatcatgaataacattgtcatctggaaacaatgagccaataggcaccattttgtgttgtaaccgagcaggcttgcttgattgtggatgcagatatgcccaccctacgtaagttgacattttgtacagactagaagaaatgtgtggtatgagatcaataaagaagtaact

SEQ ID NO: 756 - DNA, 149 bp, Homo sapiens
gtgaggacacaagcaatcctccagaggatgcagcaacaagacaccatcttggaagcagagcagccctcaccagacaccaaatcggccagcccattgatcttagacttcccagcctccagaactatgaaaaataaatttctttcgtttat

SEQ ID NO: 757 - DNA, 447 bp, Homo sapiens
  misc_feature (1)...(447): n = A,T,C or G
aaccgaggaactgacacaatgtccataataagaaaaagaaggaaaagtaagaatttcaaataatccacaaactgaaaaaatgagattgaatgaattcctctttcaaaggcaaagaaaagttaaacagtggcttctacaagaaaggtgaactccttataaatgaaaaaatgacctttgctgcatttgaggtgttgtctgtcaacattatccgtcccttttgagggtagtgtcatctgataacatttttgagtcatgggaaatttccggaaacagaacagcacacagaaaggactgacctatttctcttagagtaacatcctcgtggctcatccacgagaaaggaccttgaaaccttgaagtattctgtggnatcctgtgngtacacagntctttttttaaaanaactttaanacctttaccttnggnggcttgnctttaaagggaaaa

SEQ ID NO: 758 - DNA, 472 bp, Homo sapiens
  misc_feature (1)...(472): n = A,T,C or G
atacttcctcttatctcttatcttcccacctgagccaccagttcatagagggtatgaatgtctgactgcctccaggcatacagccagaactcactgtgtctggacgggcctcatactacagcctccaccccttccaacctcctctgcgacagactgtggctatgttcttcctgctgaacaccacctctgccctgatggctcctgcaacttggacaaagtgacaaggtgaagttcaggaggctctgtgttgctgaagaattggccttgaggttatttcatgcctgaatgaccagtggtttactaccagaatcatctggcttcctgcaaggaagatttggggcttggtatctgttcccctctcagactcagcagacacctaaccaccgctgaaagtcactgaaatcggatntttnccttcncaaaaanggnntcttnanntttggattcnccaaagggacagaggaaaaggggg

SEQ ID NO: 759 - DNA, 423 bp, Homo sapiens
  misc_feature (1)...(423): n = A,T,C or G
ggatacaccaggcagaatggagaaactgagacatcctggcaaatttgatgaggtccccaaggtctctaatttggaatacgtcctctagcaacgacctgaggcttaacatctgctgattctgtgctactgtaagatagttcttagtttactgggtctgaaaagcaggtttctcttttaacctctgggatttcttaacagttgctaccggtggtatgatcacctgatgatgtacttttagccaactgtgtgtcatcaataggggtttgtctgttttaaagaacattcaaagaaaaggaatggctagtcatacataggagatcttgttagctgggatttaagggagacttagagaaaagctaacgggaaaaggacgtgcattgtggangaaaggggggcngctgtnaccnttttaaaaaccctttt

SEQ ID NO: 760 - DNA, 465 bp, Homo sapiens
  misc_feature (1)...(465): n = A,T,C or G
ctgaacctgactgatagaagagctaaactgatgaagccttcagatactttttttttttaanactntnactccgtngcctacactggagngcaggggngatcatagntnactgcagcctcnaactccngagctnaagngatcctctngcttnaccttcctgantagctgggactacaggctngggncaccatacctactatttttnattttttatgganacaggctntcantatgttgacnanactggtnttgaacttctggtatnaagcaatcctcccaccttggcctcccaaagngctgggattacaggcntgacccacctcgtntaggcaaaaaacagctnaatggttccagtctttcagtcctgctcctggccaacantggacctttnaaaggttaaccaagttctttttcagggccgttggnaaaaaaaccccttatngttggaaaccaaaaaagggggtt

SEQ ID NO: 761 - DNA, 427 bp, Homo sapiens
  misc_feature (1)...(427): n = A,T,C or G
gtaggcagtttggaaacctgccccagctgctgcagtcatatcagacttgttctctggcttatagccatgaagacacaaccacagccttcatggtattctccactcctgatcttccagcttaatatctggactaacaagaaacttaggactctgaccagatgtaaaattaacatgttttggaagcggcagagtaatgcccaaccaacttttccccaacatggggcataaacattgtaacatccagtccaaatgtcaatccagttttctcagagataactgctctaatataagaatgtgtgcttgtacagagtttgtgatgtgaatatgtaaattttatttatgccataatctcactacagtacatcaaacagagatgcagaatgntacaaattcttcaactanacagnttngggcaggtttcacaaac

SEQ ID NO: 762 - DNA, 435 bp, Homo sapiens
  misc_feature (1)...(435): n = A,T,C or G
agtctcactctattatccaggctgcagtggtgtgatctcagctcactgcaaactctgtctccgggttcaggctattctcatgcctcagcctcctgagtagctgggactacagttcacagccgcggtggcctccagcctgaggattctcctgatacatgctactaagggctcacctgtgcttgccttctccctgggagctgtcgactcacagttaactctgtaggttgaatacatgccatctgctctactccctgttcaaagccactcagccataaaggaataaaataggaagaagcgaatggcaatggagatgcaaaaagtgtcaacaatattttggaagacataagttgtttggacaaaagacttcgaatttaacgtcagctttctccattctgctgagnggctattcctggagaaanccattaaagaataatt

SEQ ID NO: 763 - DNA, 202 bp, Homo sapiens
  misc_feature (1)...(202): n = A,T,C or G
ncaanngnnntngtggaancgacacatgcattactgtaacccacgaccacaggatgatatagatcattccttccatcccagaagacccttcatgcaccttcccagtcaacactccctacttcaagacagccactgttctggtttctttcatcaaagataagttttcccagttgtagaccttcaaataaatgaaatcatacag

SEQ ID NO: 764 - DNA, 292 bp, Homo sapiens
agatggatctcgaactcctgggctcaagcgatcctttcaccttggcctctcaagtagctgggaccacatttgctcaccagctggcccaagaccagactgggcaacatgggtcatcctcctctaagattccaggaccatgatcatccctctattgctacttcttagatcagcttgtaatgtccatctcccccaccagactgcgtctccagcatctctgagtccccagggcctggcctggggcttgctacatggtgggtgctcagtaactgtgaggtaaataaatgaatgaatt

SEQ ID NO: 765 - DNA, 121 bp, Homo sapiens
atggagaaactgagcctcagagtggttaacaacttgcccaaggtcatacagctgggaaggagtgtacctgaaattaaaatcaaattgtctgattccttcaaaaaaaaaaaaaaaaaaaggg

SEQ ID NO: 766 - DNA, 528 bp, Homo sapiens
  misc_feature (1)...(528): n = A,T,C or G
acctaactnaaaataaatgtgaagannaaacacgaagctctatgacacacttgatcnaatatgacaaacaccnaaaattnctactcagtgcacttacattgcgcttacatattctggccttactactgtgggcggcgngcntcaggtcgaaaccttctggcttnnttgcgggactccttctggntgggcaattgcagacacttgttgagcaaatcatcaaggggagcaagcaagtgtacaggtacacctaacgcacgcatgcccaccttgcgtgcctcgtgtgtacgcgtgcgtgctcgcttcatgtgcgaagcatcgtggcggggctcgcctccaagcttcagcgaagcctccgtgccgtgccgccgtgcgttgctcatgtgccgtgcgttgtgcgggcttcacttttcgggcttcaacgcagttttgaaagaagcagaagccttggaaccaanangaatctcaaagtatgtggtngcttgcaaaaccctttcttcgcttggcctgnaanaaaatccaagggactct

SEQ ID NO: 767 - DNA, 309 bp, Homo sapiens
gtatgagagccagatcctgcagcccgtagcttaggaagagcagtctctacggaggagcaggaaccaggactcccatagtctctctctggcctctgtgctgtctggcaaacagccgtgtcgccttggcctcgaaccctggagcctgcctcaccaggagacagaatcaaggacaggggcctcgccttggcaccaggtggcccttcgtgtgcgtacataaacacttttcccaggatatgaataaggtccacaggcactcgggaggaatgggtgtgttgcgatttacggtcaaggagaccaggatgtcattgc

SEQ ID NO: 768 - DNA, 384 bp, Homo sapiens
agaagaaaaaggcctcccacagagaatggccaagccaggtcactgctatttcccaacagaaatgaaaactggaattgagccatgtggaaagatggaccaggccacaagaaggtcttcgggacaaccctgaaagaggtgacccagggagacagagtccagggtcctttcaaatcactgctggcaggagcaaagatcaagataggtgaaacctgatattcaaatgcaggcgtggaaaaagaataggcacagtggttcatacatgtaatctcagagctttgggaggccgaggcaggaggatcgtttgaggccaagatttcaaggctacagtgagctatgattgcaccactgcactccagcctgggtgacagagcaagactcggtctc

SEQ ID NO: 769 - DNA, 368 bp, Homo sapiens
  misc_feature (1)...(368): n = A,T,C or G
gagaggcaacgtttcaccatgttgaccaggctgcacggggtccatttttgtgctcaccgttattcctacagcctcacagaatcctggacacaaagaaagacttaacagggttcattcattcctgaaccaaagcggctgaacgatgtcaacaggaccagagaggctacaggaacgccatattttcttctacatctctttttttaaaaatcttatttcaatggagtcaaactcaataaggtgaattaaaggaaaaagagctgacccaaacaaacaagcaaacagaaaccttttctgtcctgtaatgtttaggcgcaagataagaagtgcaaatanagaagtttaaaaagctaattaaaggggtttgtttg

SEQ ID NO: 770 - DNA, 439 bp, Homo sapiens
atgcagcaagaaggtgtcgtctatgaggaatgggcccttaagaaacctagaacctgatggcacgtttatcttcgacttcccggtcgtcagaactgtcatgcatgctgttactgatctgctatctcatcttgtcggttggcatatggcagcagagccaggcctgcagctcctccagatcctgatggatctccttcagcatctcagaagcctagattaggtacatgtaccagctgtgcagctctacctacatggtaggtaagcctttccataaaagtgaagaaagccccgtatgaattttttcaatgaatcaagactctgtataaaatcagttggctaaaaggagagcacatctgctcacttctgctgtttatgcaacatgctacagaatgaatttaaaagccaaactttttattaaaatgacaaaattgagacaaggaac

SEQ ID NO: 771 - DNA, 211 bp, Homo sapiens
ggtctcattttgttgcccatgctggagtgcagcgatatgatcaccactcactgcagccttgacttcctgggctcaagtagatcctcccacctcagcctcccacatagctggaactacagagtttactccattgctgactcctcattgaacactttgctgcaccaacccaaccaactcagagggttagagaattgtttgagacccctcctac

SEQ ID NO: 772 - DNA, 477 bp, Homo sapiens
  misc_feature (1)...(477): n = A,T,C or G
gctccatcgcattacaggagacgtcagaaactgtaacgcgcatggtcttctcccgtcctggaattttcatcggtgatcatgactgccacccctaccgcgcaatttcacaagtgggctcttataatcccacaacagccctctgacagaggcactgttatcaccccgctttaaaggagaggaagcggcggggcaccgtggctcacacctgtaatcgcagcacttcgggaggccaaggtgggcggatcacgaggtcaggagactgagaccatcctggctaacacagtgaaaccccgtctctactaaaaatacaaaaaaaagtttaggcaggcgtgatgggacaccccctgtagtcccaactactcgggaaactgaggcaagagaattgctggaacccgaaaggggcaanggttgcagtgagccgaaaatcacgtcatgctctctagccctggtgacagaacaagacttttgtctcaaaaa

SEQ ID NO: 773 - DNA, 567 bp, Homo sapiens
  misc_feature (1)...(567): n = A,T,C or G
atctacctacgttaagtcagnnnactananggccaacagaanacttngaaaaaanggaagggaanaaagaaaaagaangcaccaactctgcaaagttctntggaatctgggaagtcaagcganggcttntgccttnttcatggtgacccttttgagcaagttcagcctggttaagtccaagctgaattggcctcgctggcctatattgaattctatatggggcccgctatngggccaaattcttttggctttttaccctggggaaagaaaatactcattaaagccacctnttgttatttacccccaaatcttcacaaaggaaaaaaaaacnaactcccagcaaaagcccttttttggcntngnacctggctccttttgaaaaccagtggtgccntgcccanngaatncctttgcccccttgtgcccccgcccttacnacttcnatcccccaccttaccntttggtcccacttcttggnccggncnacaagntttcaagtccanggtccntccatncctttttctttccactttcatttaacccacctaaaagaaaaagcccttcctt

SEQ ID NO: 774 - DNA, 294 bp, Homo sapiens
  misc_feature (1)...(294): n = A,T,C or G
ccgctcatattcagggcangangtaacagngcggaatttaanacgcaaagnaagattttgttggagaanaaatgagatttctttgncnaggaaccagcccgnccttttgagcaagttcaagcctggttaagtccaagctgaattggcctccgctggcctatatngaattctatatgggccngctattgggccaaattcttttggctttttaaccctgggaaaggaaaataacttcaataaaggcccnccntntngtttttaaccccccattcttttnanaaagaaaaaaaacgg

SEQ ID NO: 775 - DNA, 217 bp, Homo sapiens
ggaccacacttcacaaaagggagcaagaaggcagataacggcaaagaaaaatgtttgtagtttactgtggaggaccaagtgagtttatacagatgtttacctcctttgggattatttgctgctggctagaatgaaaagacaaacattcccttcaaacagtatgccattgcctaataattttgcaagctcaaatgaaatccaaccaaattcagaattt

SEQ ID NO: 776 - DNA, 191 bp, Homo sapiens
  misc_feature (1)...(191): n = A,T,C or G
gcatcagcaaactttggcancagaaagcanaggactccaggcactgctcatccctacaggctgctgggtgaacaccctcgccaaagaaggagactgcagaaatcctccttgatggtatcagctcactctctcttaaatgttcatccacttttaattatttacaactaataaaacatgtaataacacggtcc

SEQ ID NO: 777 - DNA, 284 bp, Homo sapiens
agtaaataatttcaagtactgaactaattgctggctcataaggcggagtgctactgcatttctgaacagcaggctcaactgtctaaaacaccttttctaaagcatgaaggaggctgatggccatgtcaacgttttcctcaagatcaaggaatcaatcctttacgttgtgtaatgaaaggattcattctgttgatttcccccatacaaattatgtgttccacagatgaatttctgcttcaacctctcgggaggcttaataaaaggccttgaggctttgaaatgac

SEQ ID NO: 778 - DNA, 102 bp, Homo sapiens
  misc_feature (1)...(102): n = A,T,C or G
ggacaaagcttgggccgcnagntctccctttgggcaccccccaccctccttggnacaangcctgatgtnnagtcttgggtgcgactcataccggcctgggaa

SEQ ID NO: 779 - DNA, 369 bp, Homo sapiens
gagtcaccaggttcacggaacaagctccaacaagcaccctgtgctcagccacatggcacctctcctgggttctgcccattctgcgcggcctctgctctgctcaaatggctacttaccttgaagagcttcccctctaggctctacctgaacctcactctcttcgggaatcagaagataaatcatttccacacaatatccgaaaaggatgtcactctttctactatgtattgtggattctaagacacacacggtttttcacacttggacatctctgaagctggggatgtatcttataatccaagttgctcagttataattagcattttttctttctcagtggtatataaaacaatgatacaacttcaaaag

SEQ ID NO: 780 - DNA, 174 bp, Homo sapiens
ggacatctgaatcaagctatgtaaaggcaaaacctacctcatgctcagagactcagcatcctcactgaatgcgtcatcacgcctgatgaagcacaagagaaaacaagagaaactgaagatcatctatatttagtgctagaaaagaatcacaaataaatattaaaatacacactc

SEQ ID NO: 781 - DNA, 359 bp, Homo sapiens
  misc_feature (1)...(359): n = A,T,C or G
gtcatgtgacccaagaccatcccataagccntgantttngganttttggtggancngcnnggaaaaanaaactttncnttcattgganttggaatggannagggcggtcagtttgaatttgcagggncttgccttgcggcccatgggaaagggcttgccgaggactggaanctaccaaggagggaggcagaggacaccggatgtgggtgaaaatacgggccctaacacatcattttganccttggattcacccctgcctggccttgaaaccaatacattaggccccaaatatattattnggaatatatatatttnggaatatggtgtatttagaanccaatttattagaaacccaattt

SEQ ID NO: 782 - DNA, 194 bp, Homo sapiens
  misc_feature (1)...(194): n = A,T,C or G
tgggatcaaagaaagcaccagtttctgaagacatttaatacctgaggnctcaagactagcacaaacttcatttttaaaacaatctacgttgccttgttttatgtntaagatccaaangtgctagacnagttctttattgtcaatctaccatgtgtgcgaccancaacnnttaaggatgacttttgttaaatatc

SEQ ID NO: 783 - DNA, 390 bp, Homo sapiens
  misc_feature (1)...(390): n = A,T,C or G
gtggcaaccctgcataaatcaaatctatcaancaccatttttccaacaacatatgctcacttttcatntgggtcangcattttttancaatattttaaaattaagatactgccatcttttgcaaattgaaggtttgcggaaaccctgcatggaggaagtgtatcggcgccatttttccaacagcatgcgctcactttgtgtcttttttcacattcccctaaagagggaaacagcacaggactgggcagtgcaatgcttccatagtgcacctcattgcatggaccgttcccctgaggctggtgggcaagccagcgccaagcaacccactctgtgatcaacccactccccatgggaagtcttgcccttggtggcaagtgtttccatagtaaa

SEQ ID NO: 784 - DNA, 399 bp, Homo sapiens
  misc_feature (1)...(399): n = A,T,C or G
ctnacntntnnagtccaactgagnannaangcattggtctnganggagngaaggnnattccctnagaggccacaaaccagggaacgccangggcggctgaagctaccagaagagccaggagaggaaccagggatgggttctttgccttacagccctcagaggcgccaaccccgctgacacctggatctccattcctagcctccagaactgtgcaagagtaccgtttctgcctctttctgtaggaaaccacccagggtgtggtgatttgtatggcagcccccgacactctggcaagctccatcccagcgtcccctcctcccatcagctgtgacctcatgttcctctcctggactctgttggactcatggcaagaatatcttaataaacgcatgttaaagc

SEQ ID NO: 785 - DNA, 117 bp, Homo sapiens
  misc_feature (1)...(117): n = A,T,C or G
gactctgggagctcctgcttananctnnnntgttagaattggaagctaaagctaccaaagacgtagaaagaaatcttagcagggatttagtgcaagaagaagaacagttgatggaag

SEQ ID NO: 786 - DNA, 262 bp, Homo sapiens
gaagcccctctggatgcagtccaccagagaggagcagtccattatcaaagaagattatgtgggctggagacccaatgcaggagggaagcagcaggagtttctgggaggatggcagagggagatgacgggataactgcactccaggtggcaaaagcaacccatcctgacaggacagtgtgacccaagagccatgcacagtaaggggtatcatcgccatgccctctgcctcatgcaatcttaaataaatatgaatatattcaac

SEQ ID NO: 787 - DNA, 513 bp, Homo sapiens
  misc_feature (1)...(513): n = A,T,C or G
gnnggaaagctagncgnncntgnannncgagtgctggaggaagnctgnanacatctacnccacacanaannaagncnatnattnacagggcattttactaatnanangccatgctgggnnngcagnggtgcantttngnctnactgaannctctgantggnggggtcaacgatccctcccacctcagcctcccgagtagctgggactacagaaattattcctttgcaggtggtgcaaaggatcagcacgggagttttgacctgctccgtttccgacctgggtcggttcacccctccttaggcaaccctgcggttccccgctccagggaggtcaccctcttgatgctgaatttagcacggacacctgatgggcacagtgcactgcagcccagagctcctgagctcaagccatcctcctgcctcaacctncaagtagccaggaccacaggccccccccttgnggggaagaaataccaggtgcgcatgcttcaanaaaaagccgctgaggacccgg

SEQ ID NO: 788 - DNA, 284 bp, Homo sapiens
gaagccaactctcagggtcttcctccgcttctgttctctcatgccccttggtggaggctcccagatggacgctcagacacggaaggtccagggagatgcgtggatctgccgccatgtgggtggaccaagctgttgcctccattggaagcctctgtccggtgccacatcctccctgggttccagtccccacctgccaggttgacaattaggcaatttgatttactaaggagaagacaaagaaagaaaaggagaaatatttcaagaaaaaaaagactgtgaaaaag

SEQ ID NO: 789 - DNA, 400 bp, Homo sapiens
  misc_feature (1)...(400): n = A,T,C or G
ctggggagctcctgcattaanncnganttgttgganntgtgtnacaganaaagactcggngaatgccncacanngatgaaggcangtgatgcatctacaaggccaagaaatgtcaaagactgcctgcaaaccaccagaagctaagagcaaaagcacaaaagcgattctctcccacagccctcagaaggaaccaaccctacagacatcttgatctcaggtgtggagcctccagaactgtaagacaacaaatatctgctgttctaagctacttagcttgtgataatttgtcaaggcaaccctaggaaataaatacagggaacttcaaaaaaaaaaaggcnggngnggncnntnaanttnggnnttancnagncngantttgttnaaaagggggggggggggg

SEQ ID NO: 790 - DNA, 432 bp, Homo sapiens
  misc_feature (1)...(432): n = A,T,C or G
gactctggggagctcgattctcctgcctnaccctcccnagtagccaggactacagtgtcgaggtcatgaaagccactgaaagactgagaactgttccagaaaggagactagagagacatggcagccaaatgctccacataatcctgtcctggattcttctcctacaaaggaaggggtctgaggattaggtggtagtactgaatcaaggaactatcatctcctattgtgctgtaggatcttggcagccagaccccagctcccactttccctgaaagctccctttaatgaagctgaacgctgtcccagcaattccctccacagaagacctactgtcaccacctctggaggggcaattcctggaggaaccaagtcagccaatcgaaggtcctgaataagcaaaaactaagtaaataaattaccatctcgaaagtg

SEQ ID NO: 791 - DNA, 520 bp, Homo sapiens
  misc_feature (1)...(520): n = A,T,C or G
gtgactagaagcatcaggggacctgccctagacacacccagagggcagaggggaactagttccaaggagcaggttcaagcacatggtggggaaaagaatgaagctgttttctccttgtgccctccaaggttctcctcttacaatatactacttacctcgtttctcctggaattctcaatatcctgctagcccagcaggttgaaagatgtcatcagcacggtgactggctgagatcaaatcccatttttgcacttaatggtttgtaggaaagtagacagaatgctatcctccacgtaccttgattcacttatctgtacgatgtggataatcgtaggatctacctcatggagctattgngaagattaaccagccacaaagatcttaaatcagggtctagctcatggtaagtgctcaatcaatgatagcaatttatcatcatncctcttcantggaanaccctgatgttcatcaaaaaatttaatgctcattaacctctaaagaaaaanggaaaggagaaaga

SEQ ID NO: 792 - DNA, 350 bp, Homo sapiens
gtcctgctttctcatctacaactgaaggttgcatctttccttaaaagccattaacggtcatctactgtccatggggcggaggtggagctgattcatacagaatttgagaatcttgccttgcttaccatctaaagatgactcaaaagcttcttacatccaaatgaaacgtctcacttcgttcgtaaagaatgtggcatctttagggttgccttcacagtgacactatgaaaacctggatgacagcaacggcggtggcagcaaagtaaagcagcaaagtaaaaaaaaatcctgttttgtaatctccctttgtcaaatcacccacctaactggaaaataaattcttaaacatc

SEQ ID NO: 793 - DNA, 409 bp, Homo sapiens
gctatacaaaactggtggtgggccagagtttgatttctgtctcctggtgttgatgaaagaggctttgagaaaaagatgcaggaaaactcaagacaggatgccatgctgcttttggacattaccaaaaacagcagaagagggagccccgcaaaggggcactggtatgacctttatgatggagaagaaagtgattaccccctttctgcctctgcagccacaaaacagatcaaaacctatttcagaacaagctaacagactctaagaaaattatgtaagacatgaaagtatgtgaattgttacagcaatcagaaaagaattaaaaaatttaaaaatgcattttaggagcaaagactaaacaacaaataaacacaacatgtaatgccctaagaaaaacagaggggtgaaaatg

SEQ ID NO: 794 - DNA, 276 bp, Homo sapiens
  misc_feature (1)...(276): n = A,T,C or G
cagnacctgagtggctaagctcctacntcctgttctggaaggncnttcctgaccncacacatgagccatatnctnttcatacngacantntatnggtgagggaaaggcaacatttggaaggactggacnttttaccttaaggggattttaaaaaatcaccacaatggactattatcacaacntnggattcaaaatttatggatttcccttccttttggttacccaaaaggtggacttnggaagaaaaagangaagttgggagcttaaaataaaccg

SEQ ID NO: 795 - DNA, 510 bp, Homo sapiens
  misc_feature (1)...(510): n = A,T,C or G
atggagtcttcctctgtcntccaggctggattgcaagtggcaggatctcggcttactacaacctccgcctcccgagttcgagtgattctcctgcctcagtctctggagtagctgggaatacaggcacccaccttcgtgcccagctaattttttgtttgtatttttgtagagaccgggtttcaccatgttggccactctggtcttgaactcctgacctcaggtgatccgcccacctctgcctcccaaagtgctgggatgacaggcttcagccaccgtgcccagccaagatcaagttgttgttggcagggctgcactccctgcaaaggctgtaggagacaacccatctttgcttcttcagcttctaggggcttccgcagcatgccttggcgtgccttgcttgnggctgcattactccaatctctgcctgnatggcaaaataccttctnctgggccatctatcttcctgnggncacttataaggacaggtatcattggaattaatggccctcc

SEQ ID NO: 796 - DNA, 255 bp, Homo sapiens
  misc_feature (1)...(255): n = A,T,C or G
atggcagctctcaagatctgtccggaaaagtctagaagcctccagatttctaatcaacagactagcgctcctcctctgtaactgaggaacaagatgccaaggagacaggagaaagaagagaatncctttctngtttnggccntaacccnngaancanantngnccntgancntngtaaataagttacatttctgcagaggtgcttgacgttcacaccgtttggattgctttattaaaagactctttttagagccc

SEQ ID NO: 797 - DNA, 450 bp, Homo sapiens
  misc_feature (1)...(450): n = A,T,C or G
ttgaatacaaggatgtggtcaactatactgttcttaccgttgaaaaagaagtgctgaggccaggcatggtggctcacacctgtaatcccagcactttgggatgccgaggcagctggatcacttgtggtcaagagttcaagaccagattgggcgacatgatgaaaccccgtctctactacaaatacgaaaattagccattgtggtggcacacgcctgtaatcccagctactcaggaggctgatgtgggagaactgaaccctggaggtggagattgcagtgagccaagatggcgctactgtgctccaacctgggcaacaaaacaacactatgttttaaataaataaataagtgctgngatcttcngaaaaataaaaggnnannnaagnngggnccnngnggccaattaaccttgggaattnaccnggntgangtttttttaaaggggggggg

SEQ ID NO: 798 - DNA, 206 bp, Homo sapiens
ggtcttactccagttgcccaggctggagtacactggtgtgatctcagcccactacagccttgacctcccggactaaggtgtttctcccacctagcttgatgactttatttgtgtacttttctgtattccaaatcctttgtaatgactattgtaaaggattacattatggagctcaattatttaggaaataaatccctcagacactt

SEQ ID NO: 799 - DNA, 571 bp, Homo sapiens
  misc_feature (1)...(571): n = A,T,C or G
gacgtctggggagctcctgcattaagtcagaacttgaannggagcttaatggtggccnccaagctngangtgncaccgggaggatcttaacttactggaanctttngcttccgggttcaagcgaatcttnnacctcaacctnccgagtagctgggattacagacgcccccccttatgctcggntaattttccganttttggaaaaaaggggnttcaccattttggccaggctggncttgaactcctgacctcangtgattcgcctgccttggcctcttaaaagtgctgggaatacaggcgtgagccaccgngcccaacccaaacgtttattttctaatttacaggtcagggggaaagaaagntttattttggtttgctttttcccttgaggaactgaatggtttctcctttctgaatttaaaggaaaataacttactgggggtctcttttttgccctcaaaatttgctancccagtaagncccttgcagctctgttattctttataancaacaatgcccgctttttncccnccctgaattttcttggggtctactgggcttaaccctcatg

SEQ ID NO: 800 - DNA, 204 bp, Homo sapiens
gctacagggaggcactggaagaatttaaagtgggagaatgatatccatttttcactccaagttgaaaaggcacaaaactggaggtaaagaagtctacataggaggtcaaggactccttttctggattatcctaattaactattaagggagaagaattagagacctagatcataacagataattcattaaactagaacttggaag

SEQ ID NO: 801 - DNA, 528 bp, Homo sapiens
  misc_feature (1)...(528): n = A,T,C or G
gtaactcccttcccaacccatgggagacaaagtggctggcctgcagaaggcatccaggagggtgacgaaaatgaatccaactaaaaatacttgcttcctgagtcttccttacaattaggagtagccttgtaaccttgtttagccgacaagaggaatgtcgagatttgcagggagttttgctccgttgcccagactggagtacagtggcacgatctcagctcactgcaacctccaactcccagattcaagagattcctgtgtctcagcctccgaagaagctgggattacaggcatgcaacaccaagcctggctaacttttgtatttttagtagagacagagtttcaccatgttgcccaggctggtctcgaactcctaggggcctcaagtggtccacctgccttggccttccgaagtggctggggttacaggcatgagccaccacgcccggccaagacaataacatttttaatcctacatcaaaactttacatttcaaaaaatgcattttctangctgagacatttttat

SEQ ID NO: 802 - DNA, 468 bp, Homo sapiens
  misc_feature (1)...(468): n = A,T,C or G
ttgaatacaaggatgtggtcaactatactgttcttaccgttgaaaaagaagtgctgaggccaggcatggtggctcacacctgtaatcccagcactttgggatgccgaggcagctggatcacttgtggtcaagagttcaagaccagattgggcgacatgatgaaaccccgtctctactacaaatacgaaaattagccattgtggtggcacacgcctgtaatcccagctactcaggaggctgatgtgggagaactgaaccctggaggnggagattgcagtgagccaagatggcgctactgtgctccancctgggcaacaaancaacactatgttttaaataaataaataagtgctgagatctcagaaaattcccnnnnnnnnnnnnnnnnnnnnnnnnnnnnnnnggggggccgggggnccttttttnttttnatttaaaccgggttanttttttaaaaagggggggggg

SEQ ID NO: 803 - DNA, 212 bp, Homo sapiens
  misc_feature (1)...(212): n = A,T,C or G
gcttatgtgggactgctcttcttcncagaacagtggctannatgacanttttattatgatncacttccacttaatgaacagcctgagccccttcaccttntgccatgngtggaagcagcctgaggaccttcccnaagggcagantctggtggcatgctccttgtccaatctgcagaactatgagccaaataaaccatttttctttataaatt

SEQ ID NO: 804 - DNA, 323 bp, Homo sapiens
  misc_feature (1)...(323): n = A,T,C or G
attattttgcccttctgccttcttccatgggaaanactgcaatgaaagccctggccacatgcanccccttcatgttggacttnccagtcntnagaaccatgagccaantaaacttctattgcttatnaactactannatctcaggcatcttgttaccggagcacncantggtctttnacatttaataatgtgaaatgcnttggagtntgctttgtacatgatnagcactgantaaatattanagatccttangngggancnntncattgntacctctcttataataatttaaaagttataaaaccaaaaagccttcgaactgt

SEQ ID NO: 805 - DNA, 477 bp, Homo sapiens
  misc_feature (1)...(477): n = A,T,C or G
accgagtctcgttctgtcaccaggctggagtgcagtggcgcaatctcggctcattgcaacctccacctcccaggttcaagtgagtctcctgcctcagcctccccagtagctgggactacaggcgcacaccaacacacccagctaatttttgtatttttagtaaagacggggtttcaccatgttggccaggatggtctcgatctcttgacctcgtgacccacccaccttggcctcccaaagtgcagggattataggtgtgagccgctgtgcccagccgccgctgaatgtatttcttaccaccaatctgttcagtcattactattccttccccctttcctaagtaccatgggaaatgaagcataaagcactcaaagtccaaggaaaaggcaacattcaggatcagttncagaatgtctgnctctttcagacccatgctcccaccagttgggcatgcattcttcaacttggatgcctatg

SEQ ID NO: 806 - DNA, 324 bp, Homo sapiens
tttttttctagtgttcaaaggccggcggatcatgaggtcaggagttcgagaccagcctgaccaacatggtgaaaccccgtcttcactaaaaatacaaaaattagcctggcatggtggcgcgcacctgtaatcccatctactcaggcggctgaggcagaagaatcgcttgaacccgggaggcggaggttgcagcgagccaagatcacaccactgcactccagcctgggcgacagagcaagactccgtctcaaaaaagaaaaaaaaagaattttttttaaaacttcaataaaaacttaggtcccattaaatggtaaatctggctcc

SEQ ID NO: 807 - DNA, 288 bp, Homo sapiens
ctatgtcctgcttctccacttacaaggtcatatgcaactcgaatctctgtctacccacctggcatccacccttccagaccctgcttaaatgctacctcctcaaatgccaacgaactccaaaactcggttgttcattctggtggaagctgatctctccctccttggcagcctgtgtccccgtgatgcgttttgtaaacttgcagctactttgatcttgtcttggattgtacttgggtcttaccttaacccttggtccagatggcaaatacggacagcccctgtgagctc

SEQ ID NO: 808 - DNA, 277 bp, Homo sapiens
  misc_feature (1)...(277): n = A,T,C or G
gactgccccagtctacacaaatcccttccttctagcagactgagtcacacaagaataaggagagtgaagtctacatgttggggactagagtgaatcgaagcttttctggaaggagctccgtgaacctggctttgagaatctataaaaaacaagccaagtaaaatgtccaagaggtagtggtgctgaagaatccaagaacttttcgaaatacttaacaaaactatcacaaatgtattccaataaaacattttgcgatagcanannaaaacgaaaaaat

SEQ ID NO: 809 - DNA, 418 bp, Homo sapiens
gaaaagcaccaaggatggagcagcctggcctttgccccatgctggttcctgcaggtgcaaagggagaactactgctaatgggacagagaaggtccatgctgcacatggtgcagagatcaacaggtcttgagcctccagagctgtcagcctagtgcttttcatgcgccttaaaagtgaatcagagagaaaacaaagaagggtcactcttgagatcttcagtccctggcattgctggaagtaaatatgaagcatctgggagaaacagagactatattcaaaagtttacataaaactgaacagaggagggaggcggagaggggtgactggtgatgttccagagtaaaaaaagaaaaagaatccttttcaaatatattggagaactcctactactcatcattcagtaaaagccaatggaact

SEQ ID NO: 810 - DNA, 394 bp, Homo sapiens
  misc_feature (1)...(394): n = A,T,C or G
gagtctgggagctcctgcttaagtnnaactgagttgaatacanggatgtggtcaactatactgttcttaccattgaaaaagaagtgctgaggccaggcatggtggctcacacctgtaatcccagcactttgggatgccgaggcagctggatcacttgtggtcaagagttcaagaccagattgggcgacatggtgaaaccccgtctctactacaaatacgaaaattagccattgtggtggcacacgcctgtaatcccagctactcaggaggctgatgtgggagaactgaaccctggaggtggagattgcagtgagccaagatggcgctactgtgctccagcctgggcaacaaagcaacactatgttttaaataaataaataagtgctgagatctc

SEQ ID NO: 811 - DNA, 473 bp, Homo sapiens
  misc_feature (1)...(473): n = A,T,C or G
gttcctaggccccatccgaggcactgaataacaatctacagggaagaaagacatcagtcagattccaaaacctcccacggtctggcgataaacatcaaggaatcaatggcagaatactttcctgagaaattactccatgcccttgggtctagtgaagcctatttcatccatctcggagggtccatattctgtgagaaaatggccccgtcactcaagagtgatgaaatccgtggagcacggctgggctagaaatgattaccaaagcccgttaggagatgccaacagagactatattaaccatcattccctctgtcacagcaatcttgaatgaaagaggaaagaagactttctgctggttatggnatcttcgggaatcatctgacagcttatttattaaatgcatttaatattaattctncttgnactctagctgaccttcagaaacattcncgagtcnttaagaaccccaaagc

SEQ ID NO: 812 - DNA, 301 bp, Homo sapiens
  misc_feature (1)...(301): n = A,T,C or G
gcgttatgtttattgagaggaacatctgangctgcgcantctctaaggaaaagaggtttatttggctcactgntctgcnggctgtacnnnaagcatggcacctgcatctgctcctatatnagttgncagctntgntccctcacacacaaagggnggtgttaagaagttacttcaaggactgatgtcagaggcnaagnactatattgnttttctgtnagtttctattagtagattttgtatgttacagaatatagaactagcagaatacaatgaatcttaatgaaccatttattaccctgct

SEQ ID NO: 813 - DNA, 370 bp, Homo sapiens
gaactgagttgaatacaaggatgtggtcaactatactgttcttaccattgaaaaagaagtgctgaggccaggcatggtggctcacacctgtaatcccagcactttgggatgccgaggcagctggatcacttgtggtcaagagttcaagaccagattgggcgacatggtgaaaccccgtctctactacaaatacgaaaattagccattgtggtggcacacgcctgtaatcccagctactcaggaggctgatgtgggagaactgaaccctggaggtggagattgcagtgagccaagatggcgctacttgtgctccagcctgggcaacaaagcaacactatgttttaaataaataaataagtgctgagatctc

SEQ ID NO: 814 - DNA, 212 bp, Homo sapiens
gtctctggctccaaagagtgtacacctgaggagttgtagccaagggttttcatcctcaactcacctgatgcagagcatgagatctaagactgtgaacctgatgcaatattgggatgagacccatggagatcctggaatgggaatgagaatattttctatatggaaaaaatgtgaataagtttcaaccagacagcagtctgtggtagattgcc

SEQ ID NO: 815 - DNA, 196 bp, Homo sapiens
  misc_feature (1)...(196): n = A,T,C or G
atcattcctctgggggaaaccaattgccatgtcataagcagccctgttgagaggaccacatgatgagggtgtaagcctcctgccaactgccatgttgntgagcttggaactgcagcaatggctgacatnttgacttgaaaccttacgtgagaccttntggattcctgacccacagaagctgcntgagataataaat

SEQ ID NO: 816 - DNA, 188 bp, Homo sapiens
  misc_feature (1)...(188): n = A,T,C or G
agactggatctcactacttgcctagctcttgaactcctggcctcaagcaatcctcctgcctcaacctcccaaagtgctgggattacaggagtgagccactatgccncacatggtattattattattgttantaatactacattgtgcttcataaataattgctaaatatacaagaatatgtttgtttc

SEQ ID NO: 817 - DNA, 394 bp, Homo sapiens
  misc_feature (1)...(394): n = A,T,C or G
gctctgaggggctccaagaagctggtgctgtctgtgtactcaagcagggcngcatccctgggggctacgtcaccaaccacatctacacctgggtggacccgcagggccgcagcatctccccactctcgggcctgccccagccccacggtggtgccctgaggcagcaggagggtgaccggaggagcaccctgcacctcctgcaaggaggggatgagaaaaaggtgagtggggtggggaaaggaggccagcctctcagacaccgtattctccctccgaacccagaacagcagagctgcttggaggccgcaagaagaggctggttctgtccaggctctgtcttccctcaagtctgtactgaaagggtggngttttttctttgcttttctttttgacc

SEQ ID NO: 818 - DNA, 392 bp, Homo sapiens
  misc_feature (1)...(392): n = A,T,C or G
ggtttaccaggtaangtcgttttcctgggaaaaagaacgagttgaaaggaagagcaaggatccgctccggacctcactcctatattttgctgagatgaaaaccacaatccctgcactgcgagactcatctcataattagaaaacaaaggattatccaccgggttctctcccctcgccctgtggccttgctgctcccctgcagttgctccaaatgacaaaataatgacgggttcgccttgtgagagagggtggcctgctcaactccacgctggcgctctgaggggggcagaagatgcctcgtctcatttatgttgcaaacagccttaaaaaggacctgcagggcgctgggcgtggtggctcacgcctgtaatcccagcactttgggaggctgg

SEQ ID NO: 819 - DNA, 387 bp, Homo sapiens
  misc_feature (1)...(387): n = A,T,C or G
gcaaagattaaaacacatatcatgcccgggcgcagcaggctcacgcctgtaatcccagaactttgggaggccgaggcgggtggatcacctgaggtcaggagttcaagaccagcttagccaacatgatgaaactccatctctacaaaaatacaaaaattcgccaggtgcggtggcagatgcctgtaatcccagctactcgggaggctgaggcaggagaatcgcttgaacctgggaggcagatggtgcagtgagctgagatcacgccattgcactccagcctgggcgacaagaatgagactccgtctcaaaaaaaaaacaaaaaaaaccccncncntntnaaaaggtcctggaatcatttanntnatgggtntaanaaacttgaatttt

SEQ ID NO: 820 - DNA, 636 bp, Homo sapiens
  misc_feature (1)...(636): n = A,T,C or G
ttgtctattgcnccaaagggtanaagttcttggataaaaaacctngnttgaacngaaaanggtttggaaaagtggganacttgcgggtgatgaatnaaanaatgaantgccattggnangctcttggtggatgggaaatggataaagaagtggaaagaaatcancttccgctttcctttgcagaactgggccctatgatctgggatggtgggatgatgcgcctgggaaacaagtcaagcaagcaacttcccgaaagggacaaccgaagataagcaccttttcacaaaccttcggggaaaccgttcatttnccccgcttgaaacttctcaccaagcattgggcccatctcnggngggnngtgcttcttctttccttgggtgccacttgacttggcttggtggccccaacacaatgttgcttggccttacaagcanccttggngggcntttcctccgataaaaggggaaccacctttccttaatttnnttnctaaatttttttttttnggggaatcccngggaanacccccccttccaagccccttgaaagtnnnagggacttaancccttggggctttttntttttnaaaaaaaccaaaaagggggtttttttttggaaggaanaaaaccctttttt

SEQ ID NO: 821 - DNA, 395 bp, Homo sapiens
agacagagttttgccatgttgcccaggctggcctggaactcctgggttcaagcagtcttcccaccttggcctcccaaagtgttgcgattacaggcatgagccactctgccaggccaagaagtctttcttaacggacccattccaagcacttcaaccctagagtttgcatggcagtgctctgcgtttcccttcaggccagtaataggattctggatggcgcatgggctctggtattaattcctgccagcccacacctgatgccaggcacacagcaagcattgttgaaaggatgaaggcgccaacctccacctacttcaccaccttcatcttgtccaatactgtccaaactcactttggagaagaataaacattctttgctctactttccactgctc

SEQ ID NO: 822 - DNA, 143 bp, Homo sapiens
  misc_feature (1)...(143): n = A,T,C or G
gtcataagaagcttacagcattctgtggtatactgctgaagagtggtggtggttggaggaagcanatggcatgaaccctgccttcctctaagagggtgtgaaatgtgatgattcaggcttttaaattaaatgcataaagattc

SEQ ID NO: 823 - DNA, 442 bp, Homo sapiens
tcagacttggctccacaactggaacaggccacagcttgcgaaagagcccatgagtcaattcaacagagatgagctggggaagagagaggaaataagaatcctacccatgattcaagtcactgtttaaatgctgcctacatcttcatttatgcttcaacgggatctcatgattttgtctgattctaaatctttctgctccatggtaaccttcaaaatcaacagccctgtgattatggtgaaaccagaattccggcagccactggaggggagcagaacaggcttggatatcattcaaagcctcattcccagagaattgtcattatttgaactgtttagtggttttctggaagaccccacttgcaagaatgtctttatttgacctgacctgctcagtgctaaaaatctagggacatttgttgcgctcaattaaaaaccattggtt

SEQ ID NO: 824 - DNA, 625 bp, Homo sapiens
  misc_feature (1)...(625): n = A,T,C or G
ataagtgnttctccaagaatgatcccnagactngctaantgatgcntggacnttctactctggtggatggccntanncggaaagcnttggttgaaccnncaaanatggggatcaaggncntttgaacaaagangggatctgancgcacctttctccngcacagctttggtnaangaaaaggctattcaccttntggacttgaggcnacaacaagacaatnctgcttgcttntnatgcccnccgngntcccgncttgtcaagngcaaaggggccgcccggttctttttgtnaaagaccngaccttgtnccgggttgcccttgaaatggaaactgccangacccaggcaagcgccgggctatccgtgggcttgggccacagacnagggccgttcctttgcgcaacttgttgctcnggacagtttgtcacttgaaaccggggaaaggggactnggcttgctattttggggccgaaaattgccccgggccaangaacctccctggtcaatcttcaanctttggttccttggccgaanaaaaagnaatcccatcattgggggttgaaggcaaatagccggcngggnttggcataacncctttgaatacccggnttancttggccattttg

SEQ ID NO: 825 - DNA, 161 bp, Homo sapiens
gaaatgaccagtgctttggttaagaatgcacattatactgcagttctttggggaatgaagccacccttgactgaggtaatcatcagttcaaaggcaactccttgttttatctttgcactaattgcttagagaaataaccagacaatataatttatgacaac

SEQ ID NO: 826 - DNA, 162 bp, Homo sapiens
aggagaatgtgctggctctgatgttcagtgacaagggaacagagagaggtaggaaggcctgaaccagccaagagactttacctgaggtaaaaattcctcttccttcaatgcctcaaatcaggatcttgaagttggaaaataataaaagcttgtacagattcc

SEQ ID NO: 827 - DNA, 505 bp, Homo sapiens
  misc_feature (1)...(505): n = A,T,C or G
ctgttgatatcgatggaattcctgaccagtaacatttccatgaagatcattacaatttatttcttgaaactctggggaggcatggaaacatcacattgcagcagatgctggggatgcagcaatgaacaagacaggccagatccctactctcagataaacacaatgatccaggtcagtaggcatttggtaggaatctgcatcaaactgttgggcaatggtagacagcaacattgacgtctgtaaatttacacttggattttaagtttctggntggctgcatccttcttctgaaagccactgctcttttcaaaaaaacctcctaaatggctaaanctctctgggttgcaacaagttgctctttttccttgagccttaagttaaggagtttgggnagaagtaatggcttcccccactgctaacttcaaggngctacactttctcttttctaagttcctaatctggcttacncattataaaaaacccttantnaaaaatccccaattat

SEQ ID NO: 828 - DNA, 350 bp, Homo sapiens
  misc_feature (1)...(350): n = A,T,C or G
aatcaaaaagaaggatgggacaaaaatcagcaaacgtaaaaggaaaaagtaggccaggcatggtggctcacccctgcaatcctagtacgctgcgaggccgaggtgggcggatcgcttgagcccagagttccagaccagcttgggcaaccgtggtgaaaccccgtgtctacaaaaaaaaaatttagcctgtagtcccagctgcttgggaggccgaggcaggtggatcgctaggactcgggaggcggcagctgcagtgagccaagatggcgccatctcacttcacctgggcnacanagcaagaccctgtttccaaaaaaaaaggaaaataaaaaagtngtaaaaaaaatttt

SEQ ID NO: 829 - DNA, 479 bp, Homo sapiens
  misc_feature (1)...(479): n = A,T,C or G
agacctgaattataacaaggctgcaggagttccctgtggccatccggaccctgggcagactgcaggaactggggttccataacaacaacatcaaggccatcccagaaaaggccttcatggggaaccctctgctacagacgatatctctgaatggtgccatggacatccaggagtttccagatctcaaaggcaccaccagcctggagatcctgaccctgacccgcgcaggcatccggctgctcccatcggggatgtgccaacagctgcccaggctccgagtcctgtgagtgctcacaagaattctacagtcttggcattgtgcccctacccccatgtcccacaaaaagcctcttctgcttctgtccaattggtcattttcctttctggagaatgggagcaacataagcttctgctgaaacctaccccaaaaagaaccgggtttgaagnacaagttttgcccttactaactggaatggatt

SEQ ID NO: 830 - DNA, 505 bp, Homo sapiens
  misc_feature (1)...(505): n = A,T,C or G
tttgtcagtgtgcctgcgtggcggaatctgggccgtgtatggaaaagatatattgaagctgaagaggactgagagggtctttttttccatgagagtctcactctattgcccaggctggagtgcaagtggtgcaatcttggctcactgcaacctcctcctcccaggctaccaagttgctgcctcaacctcccgagtagctggaactacagtttacagagttgcagggggagccaaaaccttgccgtaatcctaccattcactgctgtgagtaatgaccatctgctggggactggagaagacccacccaatcaanttgactggcttgggttgcattgataaaaggaangncacaanaaggccaataggattgagaaccactcttccagnggngggaacgatctgcagccacccgcaaaaatngnttcactnttccantgnaggtnttttaaaaaatctntntntttgacatactcttttttnaaaggnngtcccaaaccaaataaaa

SEQ ID NO: 831 - DNA, 461 bp, Homo sapiens
  misc_feature (1)...(461): n = A,T,C or G
aacctgacctcttggcatcttcagagtggaaaacgaagcccccaatcttcctgcagggagcctcatcgtttccagcccggcagcgacttcacacgggctcattaaactcccaaataacagacttgctgtttggctttggggtttaagtggcctggaaccaaacccgaagtatagctgaggtatgcctatagtctaattaacttcacgaactgcctcgggaaagaatgaatgaactggaacttcatgcaaaagtgtatacaggccangcacggtggctcatgcctgtaatcctagcactttgggaggccaaggngggcagatcacctgggggcaggagttcgagaccagcctggcccacanggtgaaaccttgtctcttctaaaaatnaaaaaaantaacttgggcatggggggccatgcctgtaatnccactncnttgggaggnttgngccaaaaaaatac

SEQ ID NO: 832 - DNA, 502 bp, Homo sapiens
  misc_feature (1)...(502): n = A,T,C or G
aaggcaggaatgtcaaggcctctgagcccaagccaagccatcgcatcccctgtgacttgcacggatacgaccagatggccggaagtaactgaagaatcacaaaagaagtgaatatgccctgccccaccttaactgatgacattccaccacaacagaagtgtaaatggccggtccttgccttaagtgatgacattaccttgtgaaagtccttttcctggctcatcctggctcaaaaagcacccncactgagcaccttgngacccccacttntacccgncagaaaanaaacccccttggantgaaatttttctttacctacccnaatctataaaacggcccccccttatctcccttcactgacttttttttangacngggcccccctgcccccaggnnaaaaaaaaaagccttnttcttnaaaaaaaataaaaaaagnnnnnnnnnnnnggggccgggggggcaatnnagttnggatttaaccaaagngggggggggtccaaaa

SEQ ID NO: 833 - DNA, 427 bp, Homo sapiens
  misc_feature (1)...(427): n = A,T,C or G
gagactccttgtggaggggagcccctgcccgctcacctggatgaccatgcctcacctctgccgatcacatgcaaatatttgtcctgttctgagacatcctcctgggtcccagcttcttctcttgaagatacagatttccagtgcaccatcagaagccggagtaactgtgagtgggaggcattggagccggctgggaggtaagcattcgggccagcagggaggaggagtcgcccatgtagcagtgctggatgacaacattcccacactgccctcggacacatcacagaccctggtaccacaggatccctctgattcaactgaagaagagatgcanaagcttgcatgccaccaagtaactaattcgttcttctcttcttatatccattgagcagtgtgcagtgttggcacaatgcacagtacttgtcat

SEQ ID NO: 834 - DNA, 427 bp, Homo sapiens
gaaactctctggatggcgaaaacttctcaaagtccataacatttatctgacacctcaactgtgaatttacatttcatttgcatgagtctcatgtctgcaactaggttgtggtgaccttgagaacgaggggatcaagagccttgtccagcactgggagtggaggtggttggaaatcccggacccccggtccaccagccttggcctcctgcagatgctaggctcaggatgaagtgcggccgaagactgctgggaaaagaaaagaaagagccctaatgtgccatatcgggcaagccgtggggtggcccactaactgcttttttatgattggcacttactggctctgatttaaccccacttaaagagtggtggcagcaattgtggagggcctcaaagggagactgatgcaagtgagggcaaagtatatata

SEQ ID NO: 835 - DNA, 426 bp, Homo sapiens
aaacactcggaaggcccagcggggccacgctctgccaaagagaggctgacaaggagcagtgggagggagtggtggccgcagagaggggatgaacatgttcgtgggtgccaccacctgcctccctgcagtggttggacttctgtaatgttatgcaagtcgcccaggtcagggtgcgtgatgacgacaggaggcccagggaacaggagaaggctgagccgtggagcatacccatgccaatgccatttccagagctcttggggtagcagttgaggcccatttcctctcccccaagaacctacaacactctgggccccccaaaaacaaccccatccatcttggaaagaatgtgcagaaaagaggaaggaatggccacctgtcaactacattgtcacagtactgcacatgaccatcaccaaatgcccgcga

SEQ ID NO: 836 - DNA, 243 bp, Homo sapiens
gtgtccttacaaggaagtgtggaagagaacagatgctaatttatgactccggatcaatttgctcaaacctgcacacaggcattagaggcagaagaaggacaccatttttccccccgtttggtatataccattcctctggttatgttgtttattgatatcctgcctccgtgtcaggcttaatacaaataaataaacaaacaacaatctctatttttttaaataaaggaagctttttaaccattt

SEQ ID NO: 837 - DNA, 427 bp, Homo sapiens
  misc_feature (1)...(427): n = A,T,C or G
accctgtccgtcagccaggtgagcaagcctgggctagttagctgaaggataagagaccatgtggaggaagccagaggagccatccatctggggccacccaaggtcagccagcacctctaatcacagagccacgagggagttagcccagatttagaaggtgaggatattgacttcatctcttgatgcaaggagttgcagttacattgcaaagggatgcagatacagggaaggttggagaattgcagccacttttgcacaatctaccacaactactgcattgtagctgctatgcacattaaataaagtaaagacatatgaaacatttattttaanggtcctgacaacaaataagtgttcaacaagtgtgagctattattactgtttctaaaatggatcccttatcatgggagaaggtcaaattaatgcg

SEQ ID NO: 838 - DNA, 426 bp, Homo sapiens
tttccttacaatcctgttgggtaccagtctccagaaagccactatcaatcagctaacgatggcattaaagagtcaactataggatcttccagaacaaggactacacttcaggaagatgaccttcaacataggagggaaaaatgtttcatagtcaatctagtaagaagttctgccttcaaagcaaaagaactaccatttattagatgtttgccatgtgccaggcaatgtcacaacccttttatatctcatttaagttcataatcatcctgtgacataagcaacactatgtcccccagtttacagatgaagaaactaaggctcaaaaaaaacattgtgaactttccaaagggcactgagctaggaagtagtgacactcggattcaaaccttggatctggcctactttaaagtccatggtctcaaatca

SEQ ID NO: 839 - DNA, 434 bp, Homo sapiens
  misc_feature (1)...(434): n = A,T,C or G
atggagttttgctctgttgcctaggctggagtgcggtggcaagatctcggctcactgcaacctcctcttcctggattgaagcgattctcctgcctcagcctccaagtagctgggattacaggcgcccaccaccacgcccagctaattttttgatatttttagtagagatgggtttcccgagtttcactgtgttggccaggctggtcccaaactcctgacctcaagtgatccgcccgcctcggcctcccaaagtgctgggattacaggcgtgagccaccaagcacggccccgcagcctccttcttgaaagagatgtccacaccccatctggcccntccttntcccttcctcattcctaacagctggcctcctgcggctgctcccaggatcttctgcagagtccggtccagccaaccccacctacctggctccggg

SEQ ID NO: 840 - DNA, 433 bp, Homo sapiens
  misc_feature (1)...(433): n = A,T,C or G
gaattgtctggaatttntgtgnaanctnnntanancgccaacgctgcctnctcctgantantaactgatcnagaactcatttatcaccaaggggatggtgccaagccattcatgagggatntgcgcctgtgatccgaacaccttccactaggctccacttccaacactgggaatcacatttcaacatgagagttggagttgacaaatgtccaaaccatgtctccatccaaccatctatacagatcttggattcaagaagccttatgcctcttggctaaaaagagtttgaaaatcctgactcggcccattgtgctaaggncatcanaaaatggattctgcagaagcagatgctgaaatactttggtgggcagggctcaacatctccagggacagggcagggcagaagcaaggagctaaaaaaactggatctcac

SEQ ID NO: 841 - DNA, 425 bp, Homo sapiens
  misc_feature (1)...(425): n = A,T,C or G
gttcagntnaaaactgnntanaacgccaacnctgcctggatcctgactctgttgggattgttctcagagcctgctcagtgtacttggaaatgtccttcaaagcctgctaactctcatcatttcagggttgatctgatatttagaagcaactgaaaatcatttgaagccaatcccagtgaattaggtcatgtaattcagctgtaaaaatttgcccctggctgcacctggcataggagtggcacagaggggatcttgctgtgtcacccaggctggagtgcagtggtgcagtctcggctcacgacaacctctgccttccaagctcaagtgcttctcctgcgtcatcctcccacaggtgcatgccaccaggggttcaccatgttgcccangctggtctcgaactcctgcgctcaagtaatcctgtactg

SEQ ID NO: 842 - DNA, 276 bp, Homo sapiens
  misc_feature (1)...(276): n = A,T,C or G
agaactgagtcccttnncnancnctcncnctanncctcgcctttttgccttgtggangagcccatgtagcaaaggacagccaatagccaacagaaagctgatgccctcagtccaacagcctgcaagaaactgaattctgccagcaaccatgtgagattggaagcagattcttccgtgcagtcttgtgagagattatgaagcaaaggactcaagttgtgcccagattcctgacccacagataccgtgtgataataaatgcatattgtcttaaaccac

SEQ ID NO: 843 - DNA, 78 bp, Homo sapiens
  misc_feature (1)...(78): n = A,T,C or G
gcgtctggggagctcctgcattaagncnaactgaggnttgcatcgncagcttctatatattacggcctttttttttgg

SEQ ID NO: 844 - DNA, 252 bp, Homo sapiens
  misc_feature (1)...(252): n = A,T,C or G
gacgtctggggagctcctgcattannnnagagctgnggattcttatantgaaaatcnccccgggcntgngtttttaaacaaangacggaaatctttctttccgnnntnaaaggacacnttganagatgcagtangaagatggaatccatgaaccacgaagtgggtcttcagcagacaccacatctgncaacaccttgatcttggacttcctaagcctccataacagtgagaaatnaacgtgttttttaaacc

SEQ ID NO: 845 - DNA, 425 bp, Homo sapiens
  misc_feature (1)...(425): n = A,T,C or G
ccatgttggaactacatttggaaaggnggtngntnattaaacaangacgnaaatttttctttccnanctnaaaggacactttgaaaggggctnccttctgangccaaaagnttcgcccactctggaatggagctgttacctgncatcntnagcacantntcncggnaacagaaaaccaagcactgcatgttcccacttataagtganagctgaacgagcagaacacatggacatatgaaggggaacaacacactctggggcctgtgaggtgcagggagagcatcaagaagaacagctaatgggtgctgggcttaatacctgggtgatgggttgatctgtgccggcaaaccaccatggcacacatttacctatgtaacaaaccttgacattcctgcacattgtaccccggaacttaaaaataaaag

SEQ ID NO: 846 - DNA, 261 bp, Homo sapiens
  misc_feature (1)...(261): n = A,T,C or G
gaagatgccanaggctgactcacttcctccntctctctgtgcgngcanaaaggaaaggccgggtaagatgcangccatctgcnagccagaagacangcctcaacacagactgaaccctgctggattttganctggaanttccgccttccagaactgtgagagaaaaatttttgtgttgtttaagncacccactcntatattnngttatggcagcctgagccgattaatatgtacaacattctatataaaatatgaaacatt

SEQ ID NO: 847 - DNA, 203 bp, Homo sapiens
gctgcatactgattcttaaaacatgaagaacatatggcatgaggatgaagagtggacaagaggtcaaagtagctgaaatatataaaatgctaaaagtgtaacaaaactgatttcaaccaagcacttgatctcaaccaaacaaaaatgtatgcacaaaagaaatatgtcaaaataatacaatttatgctcgaaaaaaaaaaagg

SEQ ID NO: 848 - DNA, 124 bp, Homo sapiens
  misc_feature (1)...(124): n = A,T,C or G
ctaacggnacnggngcccagatgtgaggacaagagaaaggtggggtaagggatagagacggggaagacaatgagcaaacctagggttttttctggacattcaataaatgcctatttgagatgct

SEQ ID NO: 849 - DNA, 315 bp, Homo sapiens
  misc_feature (1)...(315): n = A,T,C or G
tggggagctcctgngttnagctccngctgngggtctatgtggangtaattannaatcttcgagatcatcctggattatttgggtgggtcctaaatccaatgacaagcatccttagaagagccatcccggggagagacacatggaggagaaggccacctgcaggcagaggcagagactgaggtatgcagtcacaagccaaggagcgtctggagccagcaagaggtggagatgcaagcaaggattcttctgagagccttcagaggaagcacagccccgccaacaccttgattttggatttctagcctccagaactgc

SEQ ID NO: 850 - DNA, 272 bp, Homo sapiens
  misc_feature (1)...(272): n = A,T,C or G
atattctttcagatcctgcatactgaaactactgatgccagctggtctgnnggattctatgggangntgactcaccaatgaatgaagtttccacatcctgatgatctcatccccttgccacaatgaatcnacagccccaattttccagccccttgccctccaaaatctccttaaaaaccccagtccanaactccccggaggatatggatttgangatncctctcgnctctctacttggctgccctgcaatcattaaactctttctctgctgc

SEQ ID NO: 851 - DNA, 326 bp, Homo sapiens
tgagtccttggagacagggaccctgtcctgctgtacatccagagcctgacagaggccctgatctgagtgagctgcccgaattgctgaatggacagaagaacaaccctctgaatggtggaaacagctgcctccgaggcaccagccacacggtctggctttggtcaatcctgcacgattccgcaaggcacggtgactcacgcctgtaatcccaacactctgggaggccaaggagggtggactgcttcagctcaggagtttgagaccagcctggcaatagggtgaaaccccaactctacaaaaaataccaaatacaaaaatatatatat

SEQ ID NO: 852 - DNA, 340 bp, Homo sapiens
agacggggtttcaccatattggttaagctggtctgaagctcctgacctcaaatgatccgcctcggcctcccaaagtgctggaattacaggcttgagccaccatgcccagccaaccctatagctttgcttgttcatcctgggaaggaactgtgcaagttggcgcttcgggcttggtataaaaacggctcctgaattcctgcccagttgtaatttccttggggattttgagaggggctcttcaacgttgccaggctatcacggcccttttgtttgcaagagagcagtgagtaaattatatcttgggcttagcaaagcaaaaaataaacacgatgacagtagg

SEQ ID NO: 853 - DNA, 264 bp, Homo sapiens
  misc_feature (1)...(264): n = A,T,C or G
gtcccagctacttgggagtttgaggcaagaggattgcttaagcccagaagttggagcttcagtgaactatgaacagccactgcattccagcctaggtgacagangctataactgaagaagtgggagaaggaggaaaaagaaggggaagagaaaaacagcaagaacaaaatgaacaagaacaggaagaaagaaagaaaaaattaatttaatatttttcccttggaaaataaaagctaaattccaagaatatatcatttggatcat

SEQ ID NO: 854 - DNA, 208 bp, Homo sapiens
acaaagatatttctggcaagacgtggagagaaagagtcccttcaatgaaaaaatgcaagactgttctgactgctttttcaggtaaacttcctgttggacctagttggcttgttaagtgaaggacaaaaccagaaggtgttctacatataaggctcactctgaagtttcaggctgctggactggttgcttcattacatgtactttgttc

SEQ ID NO: 855 - DNA, 221 bp, Homo sapiens
gtctccaggaagtgtttgctgaatgaatgaaaagactagataacgctgcaagtatccaagacagtagatgattggctggtaaagcagaagcggtcgcctggaaattcccttctcccatgatttgcaaaattttgcttttgtatatttttctaagaaataatctatagcttttattatgtattccagggaattgataaacccctcaacaagttaagaaccat

SEQ ID NO: 856 - DNA, 142 bp, Homo sapiens
ctctgccatgtgagaagacacgtagaatgtggctgtctgtagccagaaagagagacttatcgagaactaaattggctggcaccttattcttggacttcccagccttcagatctgtgagaaataaacatctgttgttgaagtc

SEQ ID NO: 857 - DNA, 440 bp, Homo sapiens
  misc_feature (1)...(440): n = A,T,C or G
cnnggcacanaacatgtcntccaagttaggcatcatcgtcgcctgctcttggtgaagttttcttttgcgtactgcggagagatgcgctcattaccagctggcggtggagtcgctgaaacgcaaatggatttgagactgagcgactcccatctctatggttggtatgtgacccatctatcctctggaggactcagcaaggactaccagtcaccagacaactttacgcgcacgtggtcgcaaggtgaacttgctattggttaatggcagtaaagcccgcccatcagcgctggtctgctcctttaaaagaacgccatcgacgctcccctgtctttcagcgcctgcaggttccgggaggncagcttccaacccgaaggacgtcgggatgtcatcgtccttgctgctttgccaccccattcccgtcaataaagtggtttgaaccc

SEQ ID NO: 858 - DNA, 460 bp, Homo sapiens
  misc_feature (1)...(460): n = A,T,C or G
gacgtctggggagctcctgcattaagatngagntgcggcttgtnggnagcncaactgggaaacctcgggaaacttacaatcatggcagaagatgaaggaaaaccaagcacctcttaccatggcagaggaggaaagaaagaaagcgaagggggagctgccacacacttttaaaaccatcatatctcatgananctcnttcnttatcacaagaagagcaggggggaaatctgcctccatgatccaaccacntcccaccaagcccttttcccaacntggggggatnccaattcgacntgaaattnggggggggncccanngccaacccntttcncantccatngngggngatagntgntncagtanctgtagtaaacttgcaanatattaactgtcattgncttgncnaaagggggctcattccaaannattattttgcnccatngggggacccacacagcca

SEQ ID NO: 859 - DNA, 375 bp, Homo sapiens
  misc_feature (1)...(375): n = A,T,C or G
agatngagctgaggcttgcaggnnangctggtgaggaactcctcctgggctcaagagatccagctgcctcgacctcccaaagtgctgggactacagacatgcaccaccacacctggccttttatcctctttttagcaaatgcatttagggtttgtatttacctgtaagaacaggtttacctgaatttcgcatagtttgatagggcaatccttgcattgttctcagttcttaaaatttcaaaatttccattttgaaangttccctccttatttttggattttaagcatctttaaaaatctttacacaggcaaaaaaaaaaagggccggnnnggccaattnannttggacttaaccaggggtgaattttttttaaaa

SEQ ID NO: 860 - DNA, 474 bp, Homo sapiens
  misc_feature (1)...(474): n = A,T,C or G
ggttaaactcccaaatgaagcagcaaacaaaaaacaaaccagtggctgagaggtctccaggggctgttcccctctttggggaacctgtagggagtgctgaggcggcatggttctgagtcacaggggacctgaggacacagggatggggcatgttgttccagaactccctccagcagctgcgtgctcaagcccttgtgtgctggtgagaggttggctgaggaaaggcagcgttcaaggtgaaggtgacagaaggcccaggtcaggctggatgaagacagggcccaggacgggcttcacacgtgaagctcgtggccccccttcctcctgcttccaccatcccgtcttggggcgttcttcttccaacgtcttgacttcctggggaatttntngggcatntttttccnttncaagtaccccccttcctgccttcaatgtccacaagtgggtgcagtgaatggacacttgtccaaacaa

SEQ ID NO: 861 - DNA, 341 bp, Homo sapiens
atggagcctcgttttgctgcctaggccggagtgcagtggcacaatctcggctcactgcaacgcccgcctccagggttcaagtgattctcctgcctcagcctcccaaatagctgggactacaggcacgcactaccttgtccagctaatttttgtatttttagtagagacggggtttcaccatgttggtcaggctggtcttgaattcccgacctcgtgatccagatgcctcggctccccaaggtgctgggattacaggcgtgagccactgtgcccggactgaaactgactttgaacttctgtcttcagaattgtatgcgaataaatgtgtgttcttttaagcc

SEQ ID NO: 862 - DNA, 197 bp, Homo sapiens
  misc_feature (1)...(197): n = A,T,C or G
tacnaactgnggtgggaagccaatgccccagangtttgtgggcagcccacctttgcacccgtgangcaccagtggggaatgacagtcaagaagaaaccncggganaatncnaccccttggnccancagcaccacccccttgctttccggaactcagaagtggtggagaaaaaaaataaacctccttttttgtttatt

SEQ ID NO: 863 - DNA, 335 bp, Homo sapiens
  misc_feature (1)...(335): n = A,T,C or G
cattttgggggggccaccgccaaccaaatggcgtnatgcacgtcgaataaagtgtgtgggaagttccaccgcttgtggaaccgccatgcaagttcgtgtactggatcccttgggggaaccaaacgaagttcacaagcttgaacaagttgtttcggcgaatggctttgaactggggcttgggtgctccatcattgtcctgctgggccaacaaccgtcgctttgaccttgttcgactttntgttaccaccttgcttnaaaatgccaaaagccaggaaccgggaanggatggaaatcatttaaaaaatgggncccctgaaaaaaaaaggccgaccggg

SEQ ID NO: 864 - DNA, 451 bp, Homo sapiens
  misc_feature (1)...(451): n = A,T,C or G
gcaaatgcgtaatggatgtcaaaatccagaaataaggcagcaagtattgcacagaatgtctgcattgactttgcaaagaccagaccctctgggttctccctggaacaaagatgcacaaaaggctggagcagccaaatgggccaacccctggagtgccttttttcttctgtgttaaaaagttgcatttcatgcagacccagcctattcccccaacccctcaatcttctccctccctcctacccacaagcacacatacaacagaagggacgcctctacaccctcaccagctgcctacactcattcacctgccgctggctggtttcggcacttgttttccaaaccagtcaaagaactcacagccccaggacttaaaaaggttnttattggttccatanaggcttaaatttgggggctcctaaagggatcaccatgggataaataaaaatataca

SEQ ID NO: 865 - DNA, 479 bp, Homo sapiens
  misc_feature (1)...(479): n = A,T,C or G
actgaggggcattcagataagccatcatatcccctgtgacctgcacgtacacatccagatggccggttcctgccttaactgatgacatttcaccacaaaagaagtgaaaatggcctgttcctgccttaactgatgacatggtcttgtgaaattccttctcctggctcatcctggctcaaaagctcccctactgagcaccctgtgacccccactctgcccgccagagaacaacccccctttgactgtaattttcctttacctacccgaatcctataaaacggccccacccctatctccctttgctgactctcttttcggactcagcccacctgcatncaggtgaaataaacagctttattngctnctaaancttgtnntgnnnacanttnnnatnccnctntgnttnttttgnnacnaatattgatngaattnanaannanngggggggggcggggggggnntntnttttttttttttat

SEQ ID NO: 866 - DNA, 160 bp, Homo sapiens
  misc_feature (1)...(160): n = A,T,C or G
ggcatgtggcattctagacgtaacaagcattatgatttgtttgaaagaactgntaaacagtgtccagaattaagcacatttcctccattttctcaaaagagtttcctggagaagtcagaagaaataatacaatttcctattaaatgcaacatataaccac

SEQ ID NO: 867 - DNA, 447 bp, Homo sapiens
  misc_feature (1)...(447): n = A,T,C or G
gtgcacacaatgaaggaaggccatggcccacananagaanatgntnaggccaggcntggtggctcacacctgtaatcccagcactttgggatgccgaggcagctggatcacttgtggtcaagagttcaagaccanattgggcgacatgatgaaaccccgtctctactacaaatacgaaaattaagccattgtggtggcacacgcctgtnatcccagctactcaangaggctgatgtgggagaactgaaccctggaggtggagattgcagtgagccaagatggcgctactgtgctccagcctgggcaacaaagcaacactatgttttaaataaataaataaagtgcttggaatttcaaaaaatacaatgcctannttaaaataccatatattatatattcatatggctataatgattccccacctgtttatctgtcctaacgcaaatg

SEQ ID NO: 868 - DNA, 335 bp, Homo sapiens
  misc_feature (1)...(335): n = A,T,C or G
ttataagttccttgnnnggacaaaagtggtttaacacttctgtctatctaaagatgtctacttcaaatnctgggcacaagagtgattgacagcaatttgattgattagagaggtttctttaagaagagcttttactctgaataaaatattcctgtgaggaagatgctgactggccatccaggtctgcagaagacaagaccagaggaaatggattttgaacatgttcccagagatcttttaaaaaattacctgcaaaggagtttaanccccggantancngaacaaagaaagctgagggtctctcctgaagtgaatgttttaaaaatagacagtct

SEQ ID NO: 869 - DNA, 320 bp, Homo sapiens
gaaaggcaaagggaacctccaggatgatgctgaagacagagcccactatgacagctgtgcaactatcccagagcgcagacatggggcagagtgaaaagataacacagaactgggaagcaggcaggaaacagcagaagagaagaaagttgagatgaagaaaaaaatatgaacgaaggcaatgaagtaaggggaagatggagacaacttttagggcttttactataggttcactgtttctaatataaccatcagaatcttctgtcacaaaaggttacatgttgatggaaagaatacaggaaaataaatgagatctaatttac

SEQ ID NO: 870 - DNA, 795 bp, Homo sapiens
  misc_feature (1)...(795): n = A,T,C or G
acatagggagtgtatntccccntccccaagnggaanggcattggaccttggacttgganccatgcatggcgccctaccctcaatgggaacgagggccgtcgtcgacnagaacttcagtgcactctaagaacgtcggcccaaggacctattcgcatgggactaggcagctaggacacatatggaattaaatccaacgacggacaccttagtgagtacacgtctaggtgtccaagggcaaaaaacgatggccacgtacatgcacgaacacgaaaacatgttatagtaggtaatcgtatatgtacaaccacaaacactcactagtatatccgtagacgagncgaaantggnaaaagttcaacgagtgcgcatagcaatggcgcagcaccaagagcatatattttaagagtgncctttgtctcaccataattaangggttgtncaangttggntttttccntaaantaatnaaaanaccaattncngggaanattncttttccntggncncaccaataaaaanggggcatnaccccttggttntggcatttgggtagaaanggaaaatgaccccgcggaaacatattttaataattggaaaggaancctctttgtttgtgnnccctnaaaaaaacattttgngattttttttttttntggggcccggcgcgtgggggngggncaaaattngnnattttcccnnggggttttttttaacncccccggggttttccgaaacntttttggggtccccaaaaaaangggggggggggccccccccccccccccccttttttgg

SEQ ID NO: 871 - DNA, 264 bp, Homo sapiens
  misc_feature (1)...(264): n = A,T,C or G
gctcatgaatctctgtgatgctcangagctcaancgttctgttgntggcancttttcctcncctggtgccacgttaaagcggatttggantttatctggcttgctgattgcntaccatctccccaaggagttcaaattcccacagtntaccaacacaactgatgctggaagctaaacttgctacaganaactgagagaaccaaacaattttcctttacctgttctcacgatacttgaaantaaatgtctacatggaaggaaagc

SEQ ID NO: 872 - DNA, 566 bp, Homo sapiens
  misc_feature (1)...(566): n = A,T,C or G
caactcagaggagttaatgcccatgaggaaagcagctttgtcagcatctggtcatcagaaatagaagaaaaggaaggagagaggaaaacactgttaagattcattccattatagccaaactaactnccccaaagnncaaaagaannnggggttacctnnacggaacnaaanaaantggngntttcaaanaaatgccngaatcctaaaagtttaaaggaaattatttcttcgaaatacaagtcaaagccacattgaaatctcactccttcagtttgntggcnttaaggaaaaagaaaatatnatgcccctcnccgccccnttnatggncnttattcaaccggcgcacattaccaggngttgacaaggatggggaaaaatgngaaccctcatgcnttggggggtgggaatgcaaaatgggngtgtntttgccggganaacagtttgacagttactctgaagttaatcatagagtactatggaacccaccatttcacttttaggtcccncccaanataatgaaaacatttgttcncccaaaaattggncncaatgtttctagcaccttt

SEQ ID NO: 873 - DNA, 90 bp, Homo sapiens
agaacaaatgatgaatggaggaggccactggtttacacggaaagggtaaaggacaacgactatccagatttttcttccaactttactttt

SEQ ID NO: 874 - DNA, 550 bp, Homo sapiens
  misc_feature (1)...(550): n = A,T,C or G
aggatcctctattaaatgtgtggtccatgaaccagcagcttcagcatgacctgagagctcataacctcgtctctacaaaaaatacaaaaaaagttagccaggcatggtggtacacgcctatggtctcagcaacttgggaggctgagatgtgcctgctttcctttcaccttccaccatgattgtaagtttcctgaggcctccccagccatgcttcctgtatagcctgtggtacggccaagtctcgccacatggcatcatttcctcctcacctgcagaatcgctgtgacttatggctcctctgattgcacctgctttnaccaacanccctngaaaaaaantcttttttgtggggataaaaagtnaganananctnggttncatnacttggttaaaatnggaccctctcaaatgaatgtaagcacataatggggggactacactatgagattaaaaggaatccagctgttaccaaaaatgggtgcctgccaggtttatccaccaaattctttccacttcatgtcattaaaaataaaatttgagttttaaaatg

SEQ ID NO: 875 - DNA, 400 bp, Homo sapiens
  misc_feature (1)...(400): n = A,T,C or G
tggcaaaaattcccttaaagaaaaggccccgggaagnggaagccttgtggaagccccttgggaatggttggcttggcattggcccaaaccaatggaagggaaaaattcccgggaccaccaccaaagaggaaggaacattccaagggggggccaccaaaggttgccgccaaagaatggaaaccaaaggccaccattggaaagaaaaggggccaggcaaaggaagggggaaaagccccattcttgncaaagccccaagaaagaaggaaggaaaagggcttcaagaaaagaaaaggtttaaaggttcttggcccagccantctttgaaccctttngganctttcccaagnctttttcaagaaccttggtgnagaaaaaataaaanttttcttggcttggtttt

SEQ ID NO: 876 - DNA, 578 bp, Homo sapiens
  misc_feature (1)...(578): n = A,T,C or G
ggccatcaagctcagatggtcttacaaatggcaccccaaatgagctcaactcacaacttctactgaggacccctggaccaacccactggccctttgactggcctagagaattcacctccagaggacactacaactgcagggccccttcttcgcccctatccagcaagaagtaactagagcggtcatcacccaattcccaacagcagctggggtgtcctgtttagacgggggtggggggagattgngaggtgaagccagctggacttcctgggttgactgcagacttggagaacttttctgtcttaccaaaggattgnnaaatggcccatncncccttttgtaaaaacccaccaatcanngctttgtanctagcaagaanattntaaaatgccccaaccagcnctntgtaaaatgcnccaatcagcgctntttaaaatgcnccaatcancgttttgtaaaatgcnccaattancanggatcctaaaagtggccattcncagggagaactgaaaaaaggccctcggttaggaaagaaacanacgggggganggggccaataaggggataaaagctggcct

SEQ ID NO: 877 - DNA, 408 bp, Homo sapiens
  misc_feature (1)...(408): n = A,T,C or G
gaggaagaggcanagnacgacggctcaatnaaacccnccactnntngtnnngganagngnnacttncttttggtctnanngcncttcangcttgaaccaccatgaangcngaaattccatccanttaccctggaagtgggaaaccgacaacctgcatggcattttttgaagctagacatgtaaacatcatttaaaagttctgttttcttggctcacgcctgtgaccccagcactttgggaggtcaaggcaggcagatcatgaggtcaggagattgagaccatcctggctagcacggngaaaccctgtctctgctgaaaattcaaaaaattaacccggtgtggtngtgggcccctgtaaaaaaacttctcgggaaggctgaggcaggaaaatggcgtggaaccttggga

SEQ ID NO: 878 - DNA, 186 bp, Homo sapiens
catcatgcaaactgggaagaggaccctcaccaggaaccacatctgccagcaccttgatcttgaacttctcagcctccagaacggtgtcaatggacgtggacgtgtccccggattaagcatgaccttggccctcctgggtggacgtggaggcttcagaaagattcattaaactactttccaaagctt

SEQ ID NO: 879 - DNA, 274 bp, Homo sapiens
agaaacaagcatcaaccccttcaccacggcacatctgcctctgacttctaagcgctagaccaacctatggatcctgtcatccacctccacatcctgcatgggaatccaagaacccttcatcatctacctcagtctccagtgggccagcaaaaccaccaagctctttctattgccacagctttgtcatgtgcctttctactcattctgctcttagataatcacgtgatgtaataacatcactgctatgtctactaaaaagaaatctgagaaactg

SEQ ID NO: 880 - DNA, 319 bp, Homo sapiens
gagcaccatgcaaagtgcggagatgcagagaggaaagactactcggtccttgttccttgctgtcccagaggtcacagtgctgtggggagggggacaaggacataccctgtcaggctgcgtatataaatacacaggtgctaagcaaaatgggaacggagaagggaaaggttccctccaccttgagagacccacagaagggtgttctagagatggatgagtcagactgcaagagagcaaagatatcttcctgaatacattcaatatcaaagcatcatgtgccctgtgtgtgcaaaataataataatcataataataaagtt

SEQ ID NO: 881 - DNA, 433 bp, Homo sapiens
  misc_feature (1)...(433): n = A,T,C or G
aacttaagccaaaccattctgtcatctggaaaaacaaaaaatagaagcttgggccagatcatctgtaagatttcttcccaagcacaacatcagatccaatgactgtcaactgagtgtgtgccaatgacttatttgaaggttggaacaaaccacataatcaccagattccccacattcagataagcctcaatgaagaccgtataacaccccctgaagaacagctgccatctctgcaggattctgtgagaagagggaagtgatccggacctcttggctggggccacactgggtttatctgtatctgctcctgaatcttcagcctgctacaatctgttcacacctgggtatctacagtcttgacatcctaccacttgctgctcaaggctcttaacttgagctggaaagtaaataaattgngctttcattttcccct

SEQ ID NO: 882 - DNA, 454 bp, Homo sapiens
  misc_feature (1)...(454): n = A,T,C or G
gatcgaggccatcaagctacagatggtcttacaaatggcaccccaaatgagctcaactcacaacttctactgaggacccctggaccaacccactggccctttgactggcctagagaattcacctccagaggacactacaactgcagggccccttcttcgcccctatncagcaagaagtaactatgagcggtcatcacccaattcccaacagcagctggggtgtcctgtttagacgggggtagggggagattgagaggtgaagccagctggacttcctgggttgactgcagacttggagaacttttctgtcttaccagaggattgtnnaatgcaccaatcancactctgtntaaanacaccantcagtgcttcttgtagntngcaagaagatttntaaaatgcacccaccagcacttttgtaaaatgcaccaatcaggcgctttataaaaatgcc

SEQ ID NO: 883 - DNA, 175 bp, Homo sapiens
atgagaagcagggattcccagcaaaggagaaccatgagtcacagggagaagtctggccggaagctgctgacacacattctcacaggactatggcaacttccggaagctgcctgtatgccttgtcttgtggccccttcctccctcttcagtgccagcaacattgcatttacctgac

SEQ ID NO: 884 - DNA, 377 bp, Homo sapiens
gaaaagccttgaaaatttttggagtacatatagtaagaatgcacttcactgcagcaaaaatggagtttcactcttgttgcccaggctagagtacaatggagtgatctcagatcaccacaacctctgcctcccaggttcaagctattctcctacctcagcctcccaagtagctgggattacaggcatgtgccaccacacccagctaattttctattttttgtagagacggggtttctccatgttggtcaggctggtcttgaactccagacctcaggtgatccacccgcctcggcctcccaaagtgctgggattacaggtgtaagccaccgcacctggcttaaaagtaaattttaaaaataaacagtttataaattaag

SEQ ID NO: 885 - DNA, 260 bp, Homo sapiens
tagatgcaatccatggaacactccacgtggacttggctgtttctccgcattcatggacaattaatttccagctataatccagtttcccaccaaacactgagttgcctcccaacgctgtcgaccacttgctggaacaattgtcccccctttgcatgggaaagcaagatatcatgacactttgttctgatgtgcaaaacatgcctggttttgagaccctggccatttccattgtcagtctttaattaaatcagtggttttct

SEQ ID NO: 886 - DNA, 435 bp, Homo sapiens
gcaatccaggtgacaatacggaagtttcaggaactccatcatatccagcatgtcaggatctcacatgaacgaatggcatattccactccatgtgagaaaggctgtgatgccatcatggaaaagatctagctttgaaagccagaaagaaggaacatcagccttaacacttgggagtaatgtgacctggggttgccgagtgccttactgaacaatagctctgactggctgaattcatcaacccaagtttgtgtatttagatatcatctatgtatctccgaatctgctcctcaacacacagctagctgtcataatacataatcaactagtatttctcaacaagcaaattagtagactgtcaaagggattgcttaaccatatgcttctctcattactacataatcccagaaaataaaagtaacatttgtttagaatgac

SEQ ID NO: 887 - DNA, 437 bp, Homo sapiens
  misc_feature (1)...(437): n = A,T,C or G
gggcattcagataagccatcatatcccctgtgacctgcacgtacacatccagatggccggttcctgccttaactgatgacatttcaccacaaaagaagtgaaaatggcctgttcctgccttaactgatgacatggtcttgtgaaattccttctcctggctcatcctggctcaaaagctcccctactgagcaccctgtgacccccactctgcccgccagagaacaacccccctttgactgtaattttcctttacctacccgaatcctataaaacggccccacccctatctccctttgctgactctcttttcggactcagcccacctgcatccaggtgaaataaacagctttattgctcanaaaaaaaaggccagngaggccaattcagcttggacttaaccaggctgaacttgctcaaaaggnggggccccccccccc

SEQ ID NO: 888 - DNA, 328 bp, Homo sapiens
atggagtctcgctctgtcgcccaggctggaatgcagtggtgcgatctccggttcatgccattctcctgcctcagcctcccgagtacctgggattacaggcgcccaccaccatgcccggctaattttttgtatttttttagtagagacggggtttcaccgtgttagccaggatggtctcaatctcctgaccttgtgatccgcccgcctgggcctcccaaagtgctgggattacagacgtgagccaccgcgcccggccccaacattcttttttgcttgggataaaccctcttcaggctgttaatcaatatagataaaagtatactgttct

SEQ ID NO: 889 - DNA, 450 bp, Homo sapiens
  misc_feature (1)...(450): n = A,T,C or G
ctcaggccagtaattttgacagaggtttgtcctgtattgtggccagggagcagcccagaaaaacttgcgtcactaggcccagtggggtgtgctccatcagacagaatgtgtgtgtcacgagccttctaagaatcaggaggagggaagtcattcataaaggaggcagatgctgaaatgcaactttggcttcctcttccaagtccttcaactataggaatgtggccctttcttattcacagaggggctggatttctctttacaacctgagtaccagaagctccctacctttccaagtcagaacagaacaggaaagtggctaattcgacctttgcattctccacactgggggagatcacaggccaggctgcacacctctcaaaacccaacctcangacagacgtctacagggaatgctaagactttcgaaagcaggagaaagatatgtccaga

SEQ ID NO: 890 - DNA, 245 bp, Homo sapiens
  misc_feature (1)...(245): n = A,T,C or G
atcacacaaagaagaagtcatgtgaacacacagcaagaatgtggcagcctacaagtcaagagaagaggccccagagtctaccttgcaggcaccatgatcttggatcttccagtcttcagaactgtgagatgtacatttctgttgtttaagcattcagtctttggtatgtttttatggcagcctcggcagaataagacactnattcatctangtataccatatacagttgacccttaaacagcatg

SEQ ID NO: 891 - DNA, 440 bp, Homo sapiens
  misc_feature (1)...(440): n = A,T,C or G
agcttttgtttcagctcaccttatgaagctgtttcccaagaggatgacccgggtgcctgcctggctaagtaacaagcaaacatttcggagcctaagtttgggaaagagcctgaaggcccctacaccctgaagcaacattccaagccttgctgctcacaatgcggtcccgggaccagcggcagcagcagcagcccaggacgcttgttagaaatgcggcacctccggccccacttcagacgttctgaacccaaatctgcattttatcacgatcccaggtgattcatgtgcccgttagagtgagcgaagccctggattagagaacagaaattagacgtgaccctttctttgacaggaatttatcaccaggctctatctcaagaactgngagaattcggntcaanatgtttgtgataacttttgagcagtactgactagcgtgg

SEQ ID NO: 892 - DNA, 334 bp, Homo sapiens
  misc_feature (1)...(334): n = A,T,C or G
caaaannncaactgcagatgacagccctatcgctcctncgactaccancccattgnatgtacctggnttccccatccaagccaaagagccctcttctgtgcctggactaagaaacagaatgaaaaaaccacacagaaaatcataagctggggaccaaaggcagtcaaccgtttctgcatatgcctcaaaatgtgactcaatctagaggtttccagtttcacctgagctgttaaatttacaggaagatcttcaatgatcttcggaaaagacagaagagcaagaaaatctgaaaaggatattaataaaaattaagctcaaaggggaaaaaatagtt

SEQ ID NO: 893 - DNA, 352 bp, Homo sapiens
  misc_feature (1)...(352): n = A,T,C or G
atggagtctcactgtgtcgcccaggctggagtgcagtggcatgatctcggctcactgcaaccgccacctcctgagttcaagcgattcttctgcctcagcctcccgagcagctgggactacaggcgcgccaccacaccaggctaatttttgtagttttcgtagagaggggtgtcaccatattggccaggctggtctcgaactcctgatgtcgtgatctgcccgcctcggcctcccaaagtgctgggattacaggtgcagccaccgtgtctggctgctccattgtaatcttacgggaccaccatgtatatgcaatccttggntgactgaaatggncntaanggggggattgaat

SEQ ID NO: 894 - DNA, 525 bp, Homo sapiens
  misc_feature (1)...(525): n = A,T,C or G
gcccagtccacaagggcaaggcttgcaagagaggaaggaggaatcgcggagcagcaaaccaaagccaggcctgtgtcttgagagggcttctcaccaagggaagcttccagggccttctccaaagcaccatattcaagcactggatgctgcttggacatatcaattgaggtcccagagaaatcagtatggggagaagaaggacttggaatcacacaaacatgggtccgaaccctgcttgcccttcccagctgggtaaactccagggtctcactctgttgcccaggctggagtacagtggtgcaatcatgggtcactgcagcttcaactcctgggatcaagcaatcttcctgcctcaacctccccaatagctgggactcctgaatagacaagggtcccactatgttgnccaagctgntctcgaaattttggctcaanaaatcctccttgcttggnctcccaaagngctggggtaacaggcgtgagccnccttgnccaacctattatagtcntattcttacataaata

SEQ ID NO: 895 - DNA, 366 bp, Homo sapiens
ttgaatccaggcatgtggaacccttggatatggaaggccaatgatattttgcatctatgatcttattgaaacctatttaccaagtcacgaggaaaaaagagctgaaggacaaatgatgctgacaaggggacagtcagaacctgcatactttgaatgcaataccagggcactagtgccaagagttacaaaagaagaagagccttttaactttggcgggagtgcagaagggaggaccaaaattgtaatttgaacacattattgagtaagatcatataatggaaaaggaggaaactggtttaaagagatgaaataaaggtagaggttaattagaactaccaacataaatatatgcccttttaaaagaag

SEQ ID NO: 896 - DNA, 377 bp, Homo sapiens
gcagctcactatgaggctatcacaaatcaatggaagcacatttggtgaagagtacaggcccatcagaggataccactgaatccatgctccacagcagttcccagcaagctgcactcttcgaaggcgggatgctgaaacctctgcccccaccccctacattagctttatatccaaatgtgactcggaggctggtgagctcaaggtgatcaatgacagctccaatcaaagccacccagtagacagtgcactcaccactccttgatataaaaggtgttttatttctcatccttttatttttgtcactgaaagaatgcttcccatgtgtggattaattaaagtgtaaacattaaatattgattgatgcattatcagcatgg

SEQ ID NO: 897 - DNA, 392 bp, Homo sapiens
actatcctaaacatcctgccattaattagctgaacagcccatctagtaaacaagaccgatggttgaggggctggaaaagaggaggagtcagcaagttgaaagtcacaacagaccagcccactccctcagataaaagaaaggcacatcacagttgtcacatcagcaggctagaaaagccatcccattcctgcggcaggcattctgtcaaagaaaaagaaatctgcaatgaattatcacatgaagtcaaacaaggaaaggaggcaaaaagcaagcagagccctcttcctgttttgtagactctgctggctacaatctaatagaatgcttaatctgaatatttctggtggcaaaactatagcaaccattctgtctattaaaaagtcagtgtggtt

SEQ ID NO: 898 - DNA, 397 bp, Homo sapiens
tgaaacacatatccaagaaaaggtagtctgcaggaaaactggaggaagacttatgcttagagtccttgctctgcaaacttctacaggaaccagtgtggacttggaggccttagcaaactatcacaggaacagaaaaccaaataccgcatgttctcacttataactgggagctaaatcatgagagcacaaggacacccagagaacaacatacactggggccttctggagcggggagagcatcaggaaaaataactaatgtactaggctaaacacctggatgatgaaataatctgtacaacgaatccctaggatgcaagtttacctatgtaacaaacctgcacatggacccctgacttaaaagttaaaaaaaatgagtgattaaaaacattaaaaaatg

SEQ ID NO: 899 - DNA, 310 bp, Homo sapiens
  misc_feature (1)...(310): n = A,T,C or G
attttacccaaatatgtggcnagttaagacaganaaaagaaagatgtgaggtctcagagatcttccaatgggacctaccactatgggtcaagtcatctgacatctacagaaaacctacattgcttcttttaacatacaaatataaacaaacgtacaatttaggtaggggcctcccacaaaataatcacctgatcagaattatatattaagttatgcttaatatattattatacattaaatatatgatttaaaacaaaaaaaaaanggccagngnggccaattcagctnggacttaaccaggctgaacttg

SEQ ID NO: 900 - DNA, 315 bp, Homo sapiens
gcatggttatgaagctgggaacacagcagcaaacatgagccgatgaagtctctggtctaaaaaaaacctgcactgtagtgataaaattaagtccaaccttaaaaagagtttcaaaatttaagaatgaggaggaagaggggcacctcacgtaacaggaagcagctacgacagcaaagaggaacagatactgccaaataagggttcatactcatacccccacaaaggaaatctcttaattggagacatcatgagatctgggccattttcccatctcattgaaaaatcaatgtttaaataaacacactttttatctag

SEQ ID NO: 901 - DNA, 343 bp, Homo sapiens
  misc_feature (1)...(343): n = A,T,C or G
tttttttctagngttcaaaggccggcggatcatgaggtcaggagttcgagaccagcctgaccaacatggtgaaaccccgtcttcactaaaaatacaaaaattagcctggcatggtggcgcgcacctgtaatcccatctactcaggcggctgaggcagaagaatcgcttgaacccgggaggcggaggttgcagcgagccaagatcacaccactgcactccagcctgggcgacagagcaagactccgtctcaaaaaagaaaaaaaaagaattttttctaaaacttccaataaaaacttaggtcccattaaatggtaaatctggctccaaaaaaaaaaagggccag

SEQ ID NO: 902 - DNA, 183 bp, Homo sapiens
  misc_feature (1)...(183): n = A,T,C or G
agacagcatctggctccatcacctangctggatgcagtggtgggatcctagctcactgcagcctttgaactcctgggctcaagcaaccttcccgtctcagcctcccaagtagctgggactacaggcgtgcgctaccatgtgtaatttccatttttaaaaagcacattaaaatcagagagtttt

SEQ ID NO: 903 - DNA, 517 bp, Homo sapiens
gccttgcctcgggactgggcagtttatccgcagagcaccaaggaagaatgtgtgcccactgccaactacaaagaatcatgggatcataaaccctcagaagtggaggtatcacggaaatgagcttaatgttttatgctttcctgtcgccttaaactgccaagaaggctggtgcacctcagaggaaagaatactcacaggaattagtttccggtccctgaaacccagtcatttcaacatgacagctgtttgaaatcccatgtaaccagagggtttctgagacaggaagcaacagtggcacacctagctgagcacgggggagagtaagaagcagagaggaaacaagctgaatgagaacatggcttggaggcagcaaggaaagtataaaaacaatgaaccaggccaggcgcggtggctcacgcctgtaatcccagcactgtgggaggccaaggcaggcggatcacttgagatcagaagttctagaccagcctggccaacatggtgaaaccccatctctact

SEQ ID NO: 904 - DNA, 198 bp, Homo sapiens
  misc_feature (1)...(198): n = A,T,C or G
actataacaatgaccccctatgaagaaatgcttccaagaccagcacaccagaaagaacctcctgatggtgagcagggccagaaccaccacctgnctgtcncaacactaactcttcatttgattcctcttgaagtttggcccgagtgtgaaaaatgactcttcttttaaggactcgtaataaagcagaggtgacacaga

SEQ ID NO: 905 - DNA, 122 bp, Homo sapiens
gtgtttctttatagcagtgtgaaaatggactaatacaccagaaagaaaaataaatgcaagggaattttctgggttaaagaaaaataaaggaaagtgacaaataaatgtaatctaagatcttc

SEQ ID NO: 906 - DNA, 456 bp, Homo sapiens
caattttgctccaggaagtccttgggacccaggctcctgtcagctcaccattctatcagcccacagttaagactgtggcatgtgcattccagacagcaagactgagaaaggatcctgaagaagagagacaagggctgtctcttagggaaggctccacataaaactaagctgccacatgaaacttacgcttactctgcaatagccagaactcagtcccatggccatgaaagatacaaggacgcctctgttcttggaagtcatgttctggtcaaaactggaggattctatcacattagaagaatgagaaaacagacacctggggaaaactacattttctatcatgggaacagcactctattcaagtgaactcacaattataaatgaagctactataattctgaacaatgtaccacggctaaaagtgcttcattcactttacttactcaataaatttaa

SEQ ID NO: 907 - DNA, 475 bp, Homo sapiens
  misc_feature (1)...(475): n = A,T,C or G
acgaagtctcgctcttgtcccccaggctggagtgcaatggcgcgatcttggctcactgcaacctctgcctcccaggttcaaggaattctcctgcctcagcctcccgagtagctgggattacaggcgcctgccaccacgcctggctaatttttgtattttaagtagagatggggtttcaccatgttggccaggctggtctcgaactcctgacctcaggtgatccactcacctcggtctcccaaagtgctgggattacaggtgtgagccaccgtgtgcggcctcagggaattgaacagcttggacttggagacagtgagttaaaacagaaataagaaggcngccgaaaaaaaactccccaatggaatggggtnggatatttcatatncnccccaccacctcaaaaatggtggnccttgggagggatnggaanacaagaaaattgggaggngatgcatctttcaagccttaggaaaca

SEQ ID NO: 908 - DNA, 426 bp, Homo sapiens
  misc_feature (1)...(426): n = A,T,C or G
cagctccagggggtcctcccatgacaggaattcctgatgagaagaaaaggtgcagctctctctgacaagctggctcctctcctcagaaaaaagaaagaaacaaggagaagaggatgacattgaatgtatcagagaactaagaaacttctgccagcctgagcaacttctccagccagggcgacagagcaagaccatgtctcaaaaaaacaaacaaatgaaaaaagaaatttctggatgaggaggatgctagctctacattccacttcacaaccaggccctacatcagcctatatttgaataccatggcaattcactaccccacgatctgtgaggaaatttttccttacactaaacagattgggccagttncacactttgggactgncagaaaaagcctatatatctaatataatttattataaatag

SEQ ID NO: 909 - DNA, 448 bp, Homo sapiens
  misc_feature (1)...(448): n = A,T,C or G
aggatcatatgaaattcataaacagaggatgaagaaacacagaagacagaggaaggatttagttttgggaacatgtgctaatggccatcaaacaattctgaaataactgaaagagaacctttgaaacaccctttagattaagagcctggcttgtaatctgtaacaacaaacggtattacaatgagaaaaataaatgtcctgtcaaggcattccttcaatgacatcttgtcacacaagtctatatccaaggctgcccacaaagtggaaaaatggggaaaattccctgcagtacagggccaaaaactgaagtggatgtcactgtcttctgtcctaagaaaaaagaggataaactgtantcccaaccncttccgaagcttgaggcaggagaatggcatgaacccgggaggcggagcttgtaatgagtcgagatggcgccctgcactcccaa

SEQ ID NO: 910 - DNA, 496 bp, Homo sapiens
  misc_feature (1)...(496): n = A,T,C or G
gacgtctggggagctcctgcattaagtcngaacnngagggtaaaaaaagtatnggntggcacgggggctcacgcctgtaatcccagcacgttgggaggccgaggcaggtggattgcctgaggtctggagttcaagaccagcctggccaacatggtaaaaccccatctctactaaaaatacaaaaactagctgggcgtgatggcaggcacctgtaatcccagctacctgggaggctgaggcaggagaatcgcttgagcccttgaggcagaggttgcaatgagccgagatcacgctactgcactccagcctgggcaagaagaatgagactccgtctcaaaaaaaaagaaagaaagaaagaaagaaaaaaaattcngctccaggcagacttctttttntgnttctgcctttaaaaaaatctccttggcacagcttcacntgattggatgggagaggaaatttgaggctgggagacctcctanaccacagctgtaatctt

SEQ ID NO: 911 - DNA, 309 bp, Homo sapiens
aaggcacagtcttcttctgagatttggagagcagagggcaagtgggcagcgtgacaatggtaggaaaaggcttgccccagagtgaagaagagaagaaaattgactggtaaaatgaactacaaatgtgaagaaagtgtaaaggacccaattgagaaatgaggtctatgttgcccaggctgcttgtgaactcctggcctcaagcgatcctcctgcctcaaactcccaaagtgctggaattacaggtatgagccatcatatttggctaattttacctcctttttaaataaagctgactactactacaaaaat

SEQ ID NO: 912 - DNA, 188 bp, Homo sapiens
agactggatctcactacttgcctagctcttgaactcctggcctcaagcaatcctcctgcctcaacctcccaaagtgctgggattacaggagtgagccactatgccccacatggtattattattattgttattaatactacattgtgcttcataaataattgctaaatatacaagaatatgtttgtttc

SEQ ID NO: 913 - DNA, 659 bp, Homo sapiens
  misc_feature (1)...(659): n = A,T,C or G
ttaagtcagtaacttgtagaggaaaaaccntgatggggaatggtttgaagctccagcngnaccctaaaggaggagccagggcaccagccggatggaggaaaatctcctggcccaagaaagtgacaggggaaagactccttcttcccttgctcacacaggctcccaaacatcacttcccagnggaaaacaaagtgcccatctccccacaaaggacttgtgaagctcttggaagcaccaagcaagaagactttgtcaagtttcttgttccttgggattgttcacccaagccacattggggccaagccaaaaatccttgaagaagcttgggcttgcaaagtcaagaactctttctttaccttgaaccccaagggaagttggaacccggggggccaccaagaagccttgatttcccaagnaagaagttcttccttcttaaaaaaccaaaagggcaattgggggaccccccacttttttnttcaacccgggccattggtcttggnccatttnttaccaagtttggaagggccacnttaaaatttcaattgcctttgaaacccgggccccttggggttttcaaaaacccctcaacnttnttggcccacntttttttngggcttggangtnggacccctaaaaaacccaaagtttattaagccatt

SEQ ID NO: 914 - DNA, 465 bp, Homo sapiens
  misc_feature (1)...(465): n = A,T,C or G
ctggcgatctcctgaattgagnccaactgagggacctcccacctgaacaggacgattgaactttgctttgcgatgacacaagcgacatcttggaagaggcaaaacttgagacaggtcttcaaggattggtgccatctggacaggttgaagaggagtaggagggctttcggatgtggagaatggcatgcacaaaagcacggagcaacactttatgccagttggattatggtccattgggagaaagatcaattaaggtgaaaccccagtagagaaagcactggagaacaacattcattcttccttaataaatcttagttttaaatatttgctttgagttttgttccattaataaagaaaataagaaggaaaaccccnnnnnnnnaannnnnnnnnnanggggcnggggggcccntttnnnnnggntttnanccgggtnnntttttttaaaagggggggccccccccc

SEQ ID NO: 915 - DNA, 124 bp, Homo sapiens
gccaagatgacaacgagcccagctgaagctgacatcccagcaaattgcatgacaaattgcaaagacgactaacccacaacctactcttctggaaaatacaatttaaataaaataattttaagtg

SEQ ID NO: 916 - DNA, 440 bp, Homo sapiens
  misc_feature (1)...(440): n = A,T,C or G
gatggagtgcaagtggtgcgaccttggctcactgcaacctctgccttgcctccggagttcaagcgatcctcctgcctcggcctcccaagtagctgggattacaggcacccaccgccacacccagagagtgtgacgatccccctgatgcggctgagatgttctgaaatgaagacgttggctctcatccccagcctgaagagagaaaattctgagatggctcccttacagattgagagcagatacggggtttcaccgtgctagccaggatgatctcgatctactgacctcgtgatccgcccgcctcggcctcccaaagtgctgggattataggcgtgagccaccgcgcccggcgggttgngggttaatattaaggcacttgggtanggaacacagccaanaacgattgcaggatgggtccttccaggacacttgacgtctca

SEQ ID NO: 917 - DNA, 463 bp, Homo sapiens
  misc_feature (1)...(463): n = A,T,C or G
gtggccttttcaatccttccagctaccagtcagtccacaagcncttatgggacaccagaccttgcctggagcagccttggggaatcaaataggagccagtccctgccctccagaaactgtgtgtctgggggagaagatcacacacaggaaaatcaagtggtgacaagaggtgccatgagacagtatatagttcatttccccaccgcaagagtaaagggcttagggtcagaggctttggtgcctgagttctgactctgccaattattagcattgggacctcagactcagctggcagagaggagaagcagcgggacatcaggactatggctggacgtcaganaaaaacaacttaactttaaaaggtggcagttggatgggngtaacttaggagaagaatcttgactgggagacggccagacttcanaagaagatgacctacccccccatccccttttcagcttcc

SEQ ID NO: 918 - DNA, 416 bp, Homo sapiens
  misc_feature (1)...(416): n = A,T,C or G
gttcagagagcccatggtggttcgggggaagcatcagtgttgtctacaagaatatggagcccactccaaatgaaataatcagataacattgaaaaagaggaaatccgcacaacgtccagctatggagtagctacatggtgaaatgccgggaagatgtccaggacaggatgtggtgacactgtgggaaggctttattgcagaagggaattctaagaagtgtgggagaaccatgaaatttagcccagaagagtaagaaacattgtgccaggattggaaaggaacagctctgacaaggaaacaagaataggagaaaaatgccagtgcagatagagggaggtgctaattgctcttagccaaaaacattanaaggatttgtcaaaaggagtcttacgttaaatatanaaagtctgcttctc

SEQ ID NO: 919 - DNA, 371 bp, Homo sapiens
tagagacgaagtttcaccgtgttagccaggatggtctcgatctcctgacctcgtgatccaccccactcggcctctcaaagtgctgggattacaggcgtgagccatcgcacccggccaaggtgacaaaatatttcttgctgttagttgcaggagagagaaaagatgaatactgatccacgtctgagagagagacaaaaattcaagttggagaatggtccagatacatcaccaaagcaaggaggactgtaagtggatatcaagaacctgagtgcagagacaagagacagatctctgtttctgaaaacatggcaaggaaaataacctaaatatcctctcactatcaagcattaaaaatggtggattaaattttg

SEQ ID NO: 920 - DNA, 373 bp, Homo sapiens
ctgccctgtgtttgacatttggtgattgtattcctttcctgggacagccgtaacaaaacgccacaaactcagcagcttcaaacaaccaaaatggattctctcacagctctggaggccagaaggccaacactcaaggtgtactgggaccgtgctccctctgaagcccccagggaagaatgacttccttgcccctgccagctcctggtggtggccggcggtcctgctcgctccttggcttgtagacacatctctcccatctctgcctccaccaccgcgtggccttctctgtgtgtctgtgtccagatttccctcatataagggcatcaagtcattggactggggccatcctcatacaacatgctggttagccttg

SEQ ID NO: 921 - DNA, 441 bp, Homo sapiens
  misc_feature (1)...(441): n = A,T,C or G
cttcactccttagcccagcgagaccacgagcccaccgggaggaatgaacaactccagacgcgctgccttaagagctgtaacactcaccgcgaaggtctgcagcttcactcctgagccagcaagaccacgaacccaccagaaggaagaaactccgaacgcatctgaacatcagaaggggcagactccagacgcgccaccttaacagctgtaacactcaccgcgagggtccgcggcttcattcttgaagtcagtgagaccaagaacccaccaattccggacacacctggatctctttttccagtatcactatcagttaaatcccgcctcccccccccccgaaatttataatttttttaaccnggcacccttggagatttatttaggaaaactagngacnctgntttntttganaacagantaaanagcgngggtggaactttt

SEQ ID NO: 922 - DNA, 341 bp, Homo sapiens
agatgaggccttggagcagggatgctggccacccatggagaaaaatgagacctgtgttccaggctgtcagcagagtcccggaggctttgcccatggctgtggttcaaactgtgttccacaaatacttgcaactgtctgcagggcctcggagacatgggccaaatgggtttccctcccgaatacccaggcatgacacaacttcagctttcatctaattatacactggacatccacaccgtttcacctgcaaagggttctactgttaaaataaataaacaaaataaaccctctcttttataatatgtgaactttaaattaaaataaaaaaacagattagcaac

SEQ ID NO: 923 - DNA, 639 bp, Homo sapiens
  misc_feature (1)...(639): n = A,T,C or G
gtcctcctaaatgtcttcccagccccttcgagagaattgtggaagtggggttgccagatcaaacacaagacacccagttaaaattcaactgtagggtttcgctttgccatgcaggctggagggcagtggtgcaaacagggctcacaggcagaggctgctctgcctcctaggatcaagggatccccccaccgcagcctcctgagtaactgggattacaggcacaagccatcatgcccaggcaaggattcagggacatctcagagccgctggggtctcgtcgccttcaggtcgtctgggctgggaggtctcctccctcttcctccaggcaccagtgggagcaggcagtcacaccttcctgtgagtgagaaccatagcagaaccttcaaagcacctctcaagtcgggctggagtgcaatggcgtgatctcggctcaccgcaacctncgcttccgggtcctggttcaagcagttctcctgctcaacctcctgagtagctgggattacaggcacatgccaccacgctcaactaatttttgtatttttagtaanagatgggggttcaccatgttggccangctgntttcaaaactcctgacctcgtgatccgcctgcttcggncttccaaaatactgggattaca

SEQ ID NO: 924 - DNA, 322 bp, Homo sapiens
ggaaggatgcgattggtcagcatgaatcatctgcccacccctatcgtgcgtatggactgtgattgacagttacgtgcaccacatgaagaaaaaagcagagttcttcaaacagcatgatactgtaagagaaggaatgggggacaagatctagggctgcaggattaaaaaaacaaccaaaccaaacagctgctactcttcatacgcgtcattattcctttccctttattttgtgaaatatttaagtatttttataaattgtgatattagctgcttaaagtattgtaaataaaattaaatattgtaattaaagatgtatatatat

SEQ ID NO: 925 - DNA, 307 bp, Homo sapiens
ctgtcatttgccctctctgatgaggtcagttaccatgttgtggctatcctgtgaagaagaccagatgaaaaggaactgagagatgcctctgaccaacagcagaggaggaaatgaatctggaaacaaccatgtgaataaatctgagaatgaatgcaaccctagctgaaccttaaagtaccatctgacaccttcattacagccttgtgatagactgagagccagaggacccagatgaaccacactgggtacctgacccacagaagctacaagataaatggttgctgcgataataaatggttattgcttt

SEQ ID NO: 926 - DNA, 410 bp, Homo sapiens
  misc_feature (1)...(410): n = A,T,C or G
gggactcctcttagtnagacttgattctncganctgngataaaatcanaagtggantagntggaaaaaaacatgccaccttcttgctgacattttgtttaactctcttggccaagctgattcctccttcctccatactcccaaggcacctgaggtctggctcttcaggctgtgtgacgacagggactttaaagaggcaatgaaggtaaaatgaggtcatcaggatggactccgatataaccggtgtccttacaagaagagaagacaggacacgcncacaaagcgagggtcagccatgtgaggacagtgagaaggcggccgtcacaccccaaggagagaggcctgggaanaaaccaaccttacaccttgacatcaaacttntggtctccaaaactgtaggaaaataaattt

SEQ ID NO: 927 - DNA, 668 bp, Homo sapiens
  misc_feature (1)...(668): n = A,T,C or G
atggagtcttcctctgtcatccaggctggattgcagtggcaggatctcggcttactacaacctccgcctcccgagttcgagtgattctcctgcctcagtctctggagtagctgggaatacaggcacccaccttcgtgcccagctaattttttgtttgtatttttgtagagaccgggtttcaccatgttggccactctggtcttgaactcctgacctcaggtgatccgcccacctctgcctcccaaagtgctgggatgacaggcttcagccaccgtgcccagccaagatcaagttgttgttggcagggctgcactccctgcaaaggctgtaggagacaacccatctttgcttcttccagcttctaggggcttccgcagcatgccttggcgtgccttggcttgtggctgcattactccaatctctgcctgtatggcaaattacctcctcctggtccatctatctccctgtgtgtcacttataaggacagttatcattggatttaagtgccctcctggatgatccaggatgatctcatctcaagatccttaacttaagtacaccacaaaagtcccttttgccaaatgaaataacattcaccatttncgaggataaaggacttggatacatctttttgggangncaccattcaacacactacactaataaaa

SEQ ID NO: 928 - DNA, 484 bp, Homo sapiens
  misc_feature (1)...(484): n = A,T,C or G
atggagtctcaccctgccacccaggctggagtacagtggtgcgatcttgcctcactgcaacctccacctcctgagtacaagtgattctcctgcctcagcctcctgaatggctgggactacagagctgaagtctgcctttgttactcaggagtctggaactcctggagttgaaactcctagcctcaagcaatcctcctgcctcggcctcctgaagtattgaaatgagatctctctaagtgcctcaggctggacacaaactcctgggctcaagtgatccttctgcctcagcctccctagtagttgggactacagagaatttccctaggtcaaatggcacccagaaactgcctcctctaccttgaaagctacactgtcttaaccttgaccaatggctgactgatgtgggaatncaaaagtcctcctncttgtctcaaggatggagccttgctctgtcactcaagctggaacgcaatcgcgcgatagg

SEQ ID NO: 929 - DNA, 379 bp, Homo sapiens
  misc_feature (1)...(379): n = A,T,C or G
gcagcaaattccaacaagagagaagtatcactggatggcaaacggagagtggggtcccagcctcactctgagggcaggctgaacaccttagggaccatcaacccccggnggtgtcgtttccagtgaaaaccgaactccgggatgtagccggattgganagaagcgagtggcgcgtgcgcccccttcctgcggcggatggatgaacgtttcctccaaacctctnaagagcccgtgggattttaccctttcacctgcctccgcttctgctgtatcttgtcccagttcgttaagtgtgaaggtctcagcagccacacctcgacagcataccgggaactctcaatactcctctacccattagcaataaacaatccaaaaattc

SEQ ID NO: 930 - DNA, 62 bp, Homo sapiens
gctggagtaaaagggacattgggaagattagttggaatttgaacaaaaagctccatttagca

SEQ ID NO: 931 - DNA, 418 bp, Homo sapiens
atcaaaagcagcatggatctgcctgtggatgagtggaaatcatatctgcttcaaaagtgggcttcactcccgacgtctgttcaggtcacaatttctacagcagagaccttgagggatatctttcttcactcctcttcacttcttcaacagagtttcgctcttgtcacccagcctggagtgcaatagtgccgtcttggctcacagcagcctccgcctcctgggttgaagcaattctcctgcctcacctcctgagtagctgggattacaggcatgcaccaccgcgcccagctaattttgtatttttagtagagacgggacttctccatattggtcaggctggtctcaaactcctaacctcatgtgatccaccctcctcggcctcccaaagtgctgggatgacaggcgagttaagcgcctg

SEQ ID NO: 932 - DNA, 83 bp, Homo sapiens
  misc_feature (1)...(83): n = A,T,C or G
gtgncggtgnagntggncctgcagngccgatccttncnccctagtccngatgccctgggaacctcttttcataatctgcacct

SEQ ID NO: 933 - DNA, 369 bp, Homo sapiens
  misc_feature (1)...(369): n = A,T,C or G
ggtttgcatcgccagcttctatatattaccggccctttttttttgctgggatattatctntgnaaaaacgggggaanactacccttgtntgctggggaggggacccgnggaaatggtttgggatatatgaaaattacntccnggagggattttcctgaanaanataanaaaacctntgggggaaatttttgaaaaaattccatccaataccgtngaaagtcttcaaaaatgcttgctccaagtttcacttgataccngcttgnttcttgaaatttgaaaggggacattgtttttttatgacaagnnggaaagcttatgctaaatcctgggatnggggngncncctttgtaattaaaaaaataccccccc

SEQ ID NO: 934 - DNA, 475 bp, Homo sapiens
  misc_feature (1)...(475): n = A,T,C or G
gtaattttggaaattacagaaacatgtaaagaaaaagagaaaaatacagctgtgtcataacctcattgctggaggcagtcgctgttaacatcttgtggcgaacactgagcttcatggctgactcttcacaatttgatggggatcttgctatgttgcccaggctgaccttgaactcctgacctcaagctgccctcttgcctcagcctcccgagttgctgggattacaggtgtgagctgctgcacctggccgatttanttttctgtatgagatttggtactctgaatatttctttcatccaggagagagttattgcttctatgtgcagatcttatttgcatttgggatcacggactggaaagggctcaggggtttatatcattgcaccgatttacaaaaagtgttgacagcggggaggangatctgaaatcagggccttcncgaggaggctggctgaccctnatttcctgctggctt

SEQ ID NO: 935 - DNA, 486 bp, Homo sapiens
  misc_feature (1)...(486): n = A,T,C or G
gagagagggatctcattatgactgagaaaaaaatatcaaggaagagttgcaacatgtcatttgcctccctctggcctcattgttattttctcattctctcctcccatattttgnaagagtgcattgatttattgccattttcattttttaaaacatcttcctcctacctcaacaagcatttttgcccaaagcgagtattaacaacttccccccagttctccttgtgttcctctgtcgagtgttcttattcattccatttgtnaaaaaaggaattctntgggccagcacaaagcatctgctgcttctatccaggcaaagaaagatggtggcatggggtttttatttactgaaggctgggacgaacgcagagctaagtgtgcattcctggtgctcctggctttgtaggtgatacaaaagctggtnnncctggcaagaaanaaaancccttccagaangcaaaatcaatgccggcnccccacttcacca

SEQ ID NO: 936 - DNA, 506 bp, Homo sapiens
  misc_feature (1)...(506): n = A,T,C or G
atagagtcttgctctgtgacccaggcttgtgtgcagcggtacgatattggctcactgcaacctccacctcccaggttcaagcaattctcctgcctcagcctcccaagtagctgggattacagatgaggtctccaagggaccagatggagaacagatgcaaccacactgaagtcagaatcgcagcttgcctccgacacctgacgcttcactgttggcgaggcccactatgcctcgctctccccctggaatgagttctatcccagaggctcctataccctttagaaataaactgctcaggcagcccaaccagttcatccaagaggcctggaaccacagcagcgtcgacagctgagatgagagttggtccctgatcttatacanancccgggtttaagtttganttctttcttttccttgncaagaacntttaaaaaaaaactttttgggggccggggcattttcctggttnttttccnaaccnaaaaaaagantttttttttaaaacc

SEQ ID NO: 937 - DNA, 172 bp, Homo sapiens
  misc_feature (1)...(172): n = A,T,C or G
ctttcccacggggnggncttgccccttccctggtgggggctccnntgggggaaanaaaggggganccaatnaaaaaaaaatgcggggacntctcatgatgacctgggnccttggtntttttnaaataaancctntttttttaccttgttccaataaaaaagctgaacttttt

SEQ ID NO: 938 - DNA, 592 bp, Homo sapiens
  misc_feature (1)...(592): n = A,T,C or G
agaactggaggcagtggcantcattanggctgtctttggtgccttaaacaagtatttggatcaaggtntttgtaaataagaagattttttggatggatgaagaaagatnnctttattcnagcacccaaaaaagccaaaagcnttttaantgcccatattattgtccccaaagaaaattggtataccagggaccctgggcttaancttatttcatttgcnatggcagggtaccattaaaagaaaacaattangatgcccgnacccaaaaatgccaattaccctgggaaggaaccagaccattagaggttgggaaaaattattntgggntattggggaaaggggtatttcccaacaaaaaaaaggaccattgggattgaaaaaggaccggaacgactttctttggaaccaagaaaaaacccccanggaaaaaggtcaaaaaaaaaaaggaaagccnnccanagaatggattttcttggaatggaaatantggantgggaangaaccgacttnttgcaangccctcnaactttttatttttcaacccnccaaggncttggtttcaaaccctttcaagggaanggggttttcaaaa

SEQ ID NO: 939 - DNA, 405 bp, Homo sapiens
  misc_feature (1)...(405): n = A,T,C or G
tttgctctgtcgcctaggatggagtgcaagtgcagtggcgcgatcctgcaacctccgcctctcgagttcaagcgattctcctgcctcagcctcccgagtagctgggattacagacgcgcgccaccccacccagatgatctttttaaatgcaaaatgccatcgacgcaaaaaatcaaagaatcagcttaagttccagaaaaaagaaaaaccnaccnaatgaacnatnagacnaccnccnccnccaccaaaaaagncttttggggattttgggaaatatttgngtntnattcntntactttaccngngagaaaagagnntttttttanaantnggncntccaanatggagatttaaaattcatttanggcttttggaaanggttcttaaaanaaatggatttggggg

SEQ ID NO: 940 - DNA, 147 bp, Homo sapiens
  misc_feature (1)...(147): n = A,T,C or G
atgtcctacaacaaatggtagaaagagaaggcatcacaacagagaggttgcatgagcgggtttcccacatctattatttcattttatcattgtaactgtgactttcaaaagaatgngagggcataattaaacatttactcacgaacc

SEQ ID NO: 941 - DNA, 224 bp, Homo sapiens
atggccaccagagctgcactggagagtgcatcttctgcttccatgtgtgggaagatcactgtgttctctgtgacccagtagtgtgaattgcttatctgtttctgcattaactcaaatttatcagtgattattgcctgaatacctcatgctttctgagatctacaggtacagatttagggttgaactctttctctaaataaatttaatccatgtgtgttaaaaag

SEQ ID NO: 942 - DNA, 471 bp, Homo sapiens
  misc_feature (1)...(471): n = A,T,C or G
agccaataaattttcttggggctcacatgttttcataggcccctgaaaagcccggaggccctgggtactgtgcctttagtgccacgtggaaagaacagcttgggctcaggacttcaggtggtctccacccggccactggagagaatgagacaaaaaagccccagatgaggagactcaagaagctatgaaaggtgaaggcatttgctcagagtcacacagctactgaggagcaaaccaaggatttaacccttcatccctttagctttgaggatctttcagctgcccagtgcccgtgaagatgaataaatattaactattactattatcattatcagaatcttcctctccctgaaggaattaaagaaaaaaaaaagcctcctnattctacccggttactnactggngaacccangggaaanggacttaatctggcngggcctcagtttgtcacctataaaagggggatatagg

SEQ ID NO: 943 - DNA, 341 bp, Homo sapiens
  misc_feature (1)...(341): n = A,T,C or G
aagcctgtctttgctcggngcttatcatctctggaaagggaatggaagaaaaattcaagcctagccaaaaaaagctggaangggggncccccanaaagttccaagtttggatgggtggataaanaaaatcatttcctnggganggacanttccgggaanggcactcttacgctttccnaaaatcantctcttacccctcaaagggcttttatgcttgcttaaaggcaagggccanccccccgagtttnggctggggacctcttaaatttattgggggggcnctcccccttgaatggtgnggaaaaagggggggggccttcccttcatttaaaaaaggtggt

SEQ ID NO: 944 - DNA, 469 bp, Homo sapiens
  misc_feature (1)...(469): n = A,T,C or G
attcattcgcaagagactgggttattataaagcaaggttgctcctcctcgttggtctctctgcacgcatgaanaaaagggcggccctttcttcattatgttctgatccgacacatggccttgaccagaagccaagcagatgctggcaccatgcctcttgtacttcccagcatgcagaaccctgagagacagtgtttcaccatgttgtccaggcttgtctcaaactcctgggctcaagtgatcttcccacctcagcctgacaaagtattgggattacaggcgtgagccaccatgcctgacctaaaacattttcatcacctcaaaaatatcttttatgctctttccaagttaatcaagcttctcacccccaccccaaatccaggcagctgntgggctgctttctgncactataaataanaagnggattttaanagctcacataaanggaaccatacagaatataatctttg

SEQ ID NO: 945 - DNA, 285 bp, Homo sapiens
  misc_feature (1)...(285): n = A,T,C or G
cacaaagattgagaaaatgctgttgncccccaagaaaagagatttttcagcaagatgtggggaagaccagtaatgaaagggttgtgagatcttgaatttgcaagtaatagactgcctcctggaccttccccattgagatctgtcctctgatatgagtgaggaatctttttgtccatatcttgagcattttaaacaaaagttaagcttcactttanattaaactgcatctccaaactttctttgaaaactaatgctgttagaaataaaagacaagtttgtatatgt

SEQ ID NO: 946 - DNA, 438 bp, Homo sapiens
  misc_feature (1)...(438): n = A,T,C or G
tttcagggggggancgacggnattcatcttnaatcaacagtacttttganaagcttcgancgggatcaattccnccccccccctaacgttactggcccaanccgcttggaataaagcccgggggcgnttgnctatatgntatttnccaccatattgccctnttttggcaatgggagggcccggaaacctggccctgtctttttgacgaacattcctaagggtcttttccctctcgccaaaggaatgccaggtctggtgaatgtcctgaaagaaacagttcctttgggaaactttttgaaaacaaacaaacgttttgtaacgaccctttgcangcagnggaaccccccaacttggcgaaanggtgnccttttggnggccaaaanccccgttgtatnaaaaancccctggaaaagggnggganaaaccccaagggccccc

SEQ ID NO: 947 - DNA, 172 bp, Homo sapiens
  misc_feature (1)...(172): n = A,T,C or G
aaacttataagggggatacttatataaacacantggccacatttccaaatcttcttttcaatcccagctggtggattaaacattttttgggaaagtaacctcctattataaaattaaaagccaatattaagagttttncacaatcaagaatggtcnataaaatttttaactt

SEQ ID NO: 948 - DNA, 191 bp, Homo sapiens
  misc_feature (1)...(191): n = A,T,C or G
atgctgcacttaaaaggatgcttgttttgatgncctgctcattgttntccctatgaagtatcaagtaatccatcctagagggggngttctttttaanaatttgagaaggaaaacgtacntcccanctncttttatataatgcgagcaaacaaaatatttgttacaacacttcattcaaatttatttaatat

SEQ ID NO: 949 - DNA, 516 bp, Homo sapiens
  misc_feature (1)...(516): n = A,T,C or G
tggctcacacctgtaatcccagtgctttgggaggccgaggcagatggatcacttgaggccaggagttccagaccagcctggccaacacggcgaaaccccatctntactaaaaatacaaaaaattanccaggcctggtggagcacgcttgtaatcccangtactngggaggctaaggcaggagnatcacttgaacccangngangctgcagtgatctgagatcgtgccactgcactccagcttgggcaacagaacacagactccntcttaaaaagaagaaagaaagaacttctattttttaaangttttttcctttcattgaactccatntatngcctttccattcaaagcataaagattaaattttaaaacaaggcttggccccctggcttatgcctgtaatcccancacttttntgaggccaaggngggcgggatcacctganctcaaangnttagaatccntnctggntaacattggggnaacccccttnctntaagaagaaccccatttttta

SEQ ID NO: 950 - DNA, 503 bp, Homo sapiens
  misc_feature (1)...(503): n = A,T,C or G
gtggaagatgcaatgctgatgtttgataaaactaccaacaggcacagagggagagtagcgatttacgaagagcaaatggaagcgaaaaccccttttnttctttgggccggctgtgtattgctggggcacttgggcagacccccaaagacatccttaaagacaagagaaatcgggggctgtgtgaagatgtcacatctgcagatagggttcgaggtagagcggccttttgggttttctcctcatttggagaaattgagaagtagcacggaagacctccanacccagagcttgtgtacggcacagtccttgaaggatttgctcccattctcagggagcaagacccatcttaaacgtggaaacaaatacagcagagtaatacatacttgaggcttaatgnaaagttaattcctcttggcacagccccagatatcttgaataaatggtctgcgaagtgctgaaatatcttgataatgnccgttttacttttgantatataatcaatt

SEQ ID NO: 951 - DNA, 472 bp, Homo sapiens
  misc_feature (1)...(472): n = A,T,C or G
gaccctggggagctcctgcnttnaggancacctgaggtctaantaaagcnanggaacatgctgngagccaaccaaggacagcctgactccanaagatacattcttccgaaataagacataaagccttttgtccagtagcacgatcgaggctactctgcatacagatggagtttcactcttgttgcccaggctggagtgcaatggtgccatcttgactcactgcaacctccacctcccaggttcaacggattctcctgcctcagcctcccaagtagctgggattacagagatacgattttgccatgttgcccaggctggtcttgaactctgcgctcaagcgatccacctgcctcgacctcccaaagngntgggattacagacatgagcccctgcgcctggccagcttcacgcatattgntataatcttcatggacaaatcgaaactcaaanggagntttgctcttgttgccca

SEQ ID NO: 952 - DNA, 476 bp, Homo sapiens
atggagtgtctctctgtcacccaggctgcagtgcagtggcacgatcacagctcactgcaacctccacctcctgtcctgggttcaagcgagtctcctgcctcagcctctggagtagctgggactacaggaggagcaagtgccattctgcctcaagaccctaacccaggcatctgaatctctcctgagtggtctcccttcattccttttcagctccacttggcctagtgaactccgactcattctgcaagtcccagtacaccttctttaacagtctgcatgaggcagactctcacagttcactctatatttcttccatgacactcttcccaaatgtaactaaaggattacttgtataatttttcctttagcatttgtttttcaaactagactgcagctcactggaagcaggtcactgaaatttagaaggcccaaccaacatcttttaaatgaaatcaataaagcaaagatggcacaag

SEQ ID NO: 953 - DNA, 353 bp, Homo sapiens
gtccataaaagccctgggctcggccacagcagggcaaagaccagaggacagagagaggaaggggataactacctgcagagaggagctatcctctttgctgagagcttcagaggcctgcagagacatctgaacaacctgcctacaaagaggagccaccctcttcagagcctcctctctgctgagaacagcagacagcaggatgaccagtgggcagagaagagctaccccctccagggcctcctctttgctgacagctgaacactccatgggatgacctgcctacagagaggagctacccacttccggtctcttctgagccattctaacactaaataaaattcttcttcatcttc

SEQ ID NO: 954 - DNA, 326 bp, Homo sapiens
ggtttgactccctagaacacttctatcaaacaaagccgaaacggggaggacagagagatatttacacgaagtttcaccaccttgcccaggatggttttcaactcctgagctcaagcaattcgccaacctcagcctctcaaagtggtgggattacaggcaggagccaccaagcctggccttacgtacatcttttgactctccaaaaacttaactactaatacccttctgctgaccagaagccttagtagtaacataaacagtcgattaacacatattttgtatgtttcatgtattatatactgtattcttacaataaaataagctag

SEQ ID NO: 955 - DNA, 140 bp, Homo sapiens
gtccctgcacctgtcacaccacaaacaatgataaaaacggagacacctgggtgagcctcactcactgcgcatgcctccatcttcgaagagctcctgttcactgtactctgaaatagactgtgcaaaacattaaaactgac

SEQ ID NO: 956 - DNA, 245 bp, Homo sapiens
actccattggcaacggagcagcagaggagagaagagaagcatctgaacgttgagaggagaagcagcagctggacattggagactacagtcggagaggagttcaaccagagatagttggagagaagtttggtcagacagccgaactccagggaaataccaccttctcgctccatccccttcccagtcccccctcccactggaagccacttttatcagcaataaaatcctccgcgttcaacaccctc

SEQ ID NO: 957 - DNA, 373 bp, Homo sapiens
  misc_feature (1)...(373): n = A,T,C or G
gagggcatcccaggagaaggcagagtccaggaggcggatgttgggaagcaaatcctgaactcatcaagtcccatagcccctttgtctatggaccttctgccagcatcttctgtaagactattaaaatgcaccaacccaaggtctccagtgctgctgagtcccccgtgtcacctcctgcaactgccacagttgtcaacagctcaaatcctagagaccttcttcattaggtcaatgagtatctaaactttaaaaaataaataaaggggtaattattagcttgccccccatcccaacaaaaaaaaaanggccagngnggccanttcanntngaanttanccaggntgaacttgntnaaaagggggggactacccaa

SEQ ID NO: 958 - DNA, 412 bp, Homo sapiens
gagatgccccagtactttaatatgtaccaacaattggctatgttatggaatctgcaatgtggcctccgctgctgacctctgaaacacaattcccagtctgactacggaaactgttcagtttgatcctttcaacttatttgaatcctgacaaataagctcacagctgaaaggtcaacatagtcgtatttcatcctccagagctgttcttaagacatctgcacaacaaagcacttcttatagcacctgacatgggccctcaatggcactgtacctcattaaaaatgtcccctgcatgcgcacgcattccaaggcacatggtctggtgatggtttaccaaataagtgtttacagaagggttagtaaacaaggcagattgtcaacttttccaataaagcgtcactatagtgctgaa

SEQ ID NO: 959 - DNA, 248 bp, Homo sapiens
agacggggtttcaccatattggttaagctggtctgaagctcctgacctcaaatgatccgcctcggcctcccaaagtgctggaattacaggcttgagccaccatgcccagccaaccctatagctttgctccacctgggaggagctggaggacaaaggacttcacagaagaatggagtcccaaagaaacagcttcaggaactgaggagagccagaaatttaatgtatttagggctcccttgtgaaaacac

SEQ ID NO: 960 - DNA, 455 bp, Homo sapiens
tgactgaaacgctgaaccaagcttggagctggagcagccattttgggccacgaggtagaagccatgtgttgaagagaatggaacaagatggaagaaacctggtgatcagggagccgccataacagtcttgggttgtctctgtttacatgagagatgaggaaactgaggctcagagaggttaaatatcttcctcaagaattttcgccagagctgggatttgaaccaaggtctgcttgacttagaaggcagtggtccttgctttctcccgaggagaagggagcagagatacctaaagatgcctgactcccaatcccatgggaacatgccccctgcgggctcacttcctctcctctttgtcttcaatttctaagaatgtcttcttttcactaaaacaaaacactccagaatgcattctgcatgaataaagactgccaactccatggcagaaataacat

SEQ ID NO: 961 - DNA, 443 bp, Homo sapiens
  misc_feature (1)...(443): n = A,T,C or G
gtaattcatgcagctcctgagacaagattctaaccatgatgaagttggaaccggagacttctacgagaggatgagtcaaaactcagtaagaaaggcagtcctggctccctgccatgcttctctcccctaccctgctcacaagggctgatgtgtggctctccaaccatcactccattgctcctcaagtggacagtggaaggacaaatgtatttcagccccaaagcacaaatcacctgattcaaccctcatgggtgacctagtcaagtggccacctctgggccctacatcagcctgcccttccttttatcataccacctgtctaactgtattataaggatctttttccatgactaaatttttttttgaaaacaaaaaaaaaaaagggncnnggggnncnttnnnntnggncttnannngggggaanttnttnaaaaggggggggg

SEQ ID NO: 962 - DNA, 397 bp, Homo sapiens
gagaacctccggtgctgaagaatagagagctgcccgccccgcctgggagaaaccttcagatgcgcccccgttgttcccccgccgacagaggcttgatgccgcttcaagtgcccgcagttatttttgtcagccatcctctcctcccactcctcccaaagaaagcattcagtgagtcatcgggagacccggagacatctgacggttgctcagctggtatccggccactgaggggaaggaggagtgtgttgatgtccccttggactctccttgaagaaactgcatagattcacagactcctggaaaatcagaatccagaatgtgcacatgatacacgtttggtgtgtgtgtttatttgtattcactcacggattcaacaaatatttgttgattacctgcc

SEQ ID NO: 963 - DNA, 554 bp, Homo sapiens
  misc_feature (1)...(554): n = A,T,C or G
gaggaactgacgagccttcntctaccacataaaaattgcagcaaaccctgcagctatcctgaagctgccatgctgaaaaggccaattgggagaccacatagagaccgagagagacttccaaggactccagccaatcctgggccccagcagtttgaatctcccagcaatgccaccatacaggagagggagcaaatactcanaagattcaagtgccagctgcatgggttgatacctacataaaaggcattggcattattcacaagagccaagatatggaaataacctgtgtccattgacagacgaatagatgagggaaacgtggcatatacacacagtggaatattattcggacttaaaaaaagaaggaaatcctgaatcctgctatttctgacaacatgagactgcaggacgttatggaantggcccatcatgctcttntaaaactttncatccctcagncaanaagggggagcctatttaccctggnccttgaantggaanaaggacttttgccctggcnttgtttttancatccccttgntgaaaaaaaaacc

SEQ ID NO: 964 - DNA, 131 bp, Homo sapiens
atttttcttggattttatttccctttcaatggcctactctcagtgttggtgtctgagcttcctctgtgtggaacagaagatttttaaacctgtatatttatagcaaacaatgaatctctaaatagttctcc

SEQ ID NO: 965 - DNA, 305 bp, Homo sapiens
gctgtgatgaacagaaagaggccttggagagccgtgggactcaggagctggagccaggcttgagacggggtccagaaggagcaagatgggatgcctttggactgagaccttaaattccacccagtttattacaaccatgctcactcctctacctgccctgccccaatcggtgcaaactgccttctccagtcttgcttcctctctaatccataggttgtctctgttttaagaaggcaagtggccagtgagagccttaaactaccttagtgttctctaaataagatatgcctccatggagttgtaag

SEQ ID NO: 966 - DNA, 601 bp, Homo sapiens
  misc_feature (1)...(601): n = A,T,C or G
gtgattgcaaatctatggatgagaccaagggagaattttcacgccatcatagcattttattcctcacctgactgggaacagctcgaagggaaggacatgtctccaaagacatgaggagtattcaacgtggcattcgaggcgcaaggaaaaacctgcctatcccaagatctcagccccatcagccagccaagggatccacaatgacccttatgaagtttcataaggaagctaattgcttaaatgagatttgagtcaagaaggatgacctagcaataacctctatatatctcattatgccaatacttaaatggctacataagaggacagtccagtgacagacatggaaagaggcttagaggtcatctcattcatcacaccattttacagaggaaagcaaaatgccatccagagaaggaaagtcacaaagccatctaaccccagacctgggagtagcagctgatcacagcgggtcggacacaagaagctgcttncaaaaatctttnctttcatttggctacagagaagacatcagaaaacaaaantttataacatggctctagctctaactcactattcactaaagggccaaattaatagggga

SEQ ID NO: 967 - DNA, 161 bp, Homo sapiens
agacgtgagtcttgctgtgttgcccgggctggctttgcctctggaactcaagcgatcctcccacctcagcctctcgaggagctgggactacaggcgtgcaccatcatttcctcctaaaattgtatgtgctgcatatataaaatgataaatgctttacatat

SEQ ID NO: 968 - DNA, 315 bp, Homo sapiens
cttctccagactctgagttagaagcaaatgaagattggtggcaagagcacccactcctcctgcaagtcgcccagcagtgaagtaggaggcttggacacagggagagataaatgtgggttcttctaagacagatgcaggatccagcttattccttgaagtttccagtgttctgcactctactacttgacatccatctttccttcatgaccccctgctctataacttcaggctcagcaccaaacagaataaacagttgaattaagtatggctactacataaggtcagatctctataataaattctttactctacctc

SEQ ID NO: 969 - DNA, 280 bp, Homo sapiens
aaccacaacatttggagattaccaacatggttttcagccctcagctttggcgaagacttcttccttttcattcttttctgggcaaatctaaacctttggagaagtagatgagtgaagtcaattgcaaagaagaggagtttgggacacagacttgtgtgaggacacagggagaagacagcgtctacaagccaaggagagaagactcaggaggaaccagccttgcccacaccttgatcttggacttccagcctccagagcataagagaataaatttctgttg

SEQ ID NO: 970 - DNA, 587 bp, Homo sapiens
  misc_feature (1)...(587): n = A,T,C or G
ctgtagtgcagtggcacgatcttggctcactgcaacctccacctcccaggctcaagcaatcctcccactgcagcctccgagtagctgggactacaggcatgtgccaccatgctgggctaatgttcgtattttttgtaaagatggggtttcaccatattgcccaggctggtttcgaactctttgagatcaagtgatctgcctgcctcagcctcccaaagtgctggaattacagtgctctgaatgaagtggcaaagactgagggccttggggagcaagtcttcaactgccaaacagtcagtgaacagataaagaaccacagaaacagaggactggtcccagcnagcgtcagacccccagcaaggagccagtctgcactgacccactgaagaaatggctcccgggggcttgactttgtattttaaaaaaagtccgcaagtcaacctaaagactgtagctttcaaccactgatgtctcgggtgnacacttgacatttggaaaantnggctggtcatttcaccccacccatcatggtccctttnttttactgagggtccaaaacacaaaatcaccttagaatcatttggttt

SEQ ID NO: 971 - DNA, 485 bp, Homo sapiens
  misc_feature (1)...(485): n = A,T,C or G
gagggccactggcctggaagaccagacagaaggctgcagaggctggtgccgctccacatccactcaggcccaagcctgacaccttggaggacacgctggagacacgtggaaagttgaccaggaacagagccaagtacttcccaggctccgtgggcatcaaagggattgcaccttttccagacccaatccacagctgcaggcagcaggcaggagtctgcactgacaaacgactcacctctgcacactgcttgattccagaacctgcgttctgacaccgatcacacctgccatcccctgccgggcccaacctcactcaggaatgcctgcgacccagcagcctgtcgtgggctgtgctgcgaatgccacacatgggccaggctcttcctcccgcaggcctttccagctgtcctctgcagcttccttgagctcgttctctttttctctgtgaggcatgnaagtgagatgcatgcacccaccttggtatt

SEQ ID NO: 972 - DNA, 221 bp, Homo sapiens
ccgctaaatctgtgttgctgagcctgctgtttgcatgcaggaatgtgaaggactgctcaagttggagatacaaattgaagccagccccagttcaaaactgttacaaatggagtctgtaggcatgaggggctgactatataactcagagttctccagtactttactttaataaagaacacaatctttattaaaggataagtaataaaaatgtgttgatgtgc

SEQ ID NO: 973 - DNA, 582 bp, Homo sapiens
  misc_feature (1)...(582): n = A,T,C or G
ctaatgcaagagatacaccaagctgagcaacaagaaaagatctactgaaagtctccttggctttaccaagaaagttgccgtggacccttaggtcacatagcctgaccatgctcagatgaaccaatggtgcaaccacaggaggaacctaagtgctcagctgagaagcagggactgaatcaagcagcagacacgatgataaagtttggatgtttgtcccctcaaaatctcatgttaaaatatgaccccaatgttgagagtggggtctaatgagggagtcctcccaagaatggcttagtgccctccaagaggaaatggctggtaataagtttacacgagattcggttgttaaaaagagcctagcaccccctcccttctcccctgctccctctcttgcatgtgacacacctgcttccccttgcttctaccatgagtaaaagcttcctgagatctcaccagaagccaagcagatgctggtgccatgcttgtcagcctgcanaactgtgagccaagtaagcctcttttctttataaattacccaatctcaggttttcatttatacaatgaaaaacaaacccatattac

SEQ ID NO: 974 - DNA, 223 bp, Homo sapiens
gtggctctccctgtgtgggtacaagatgacccccggcgtgtcccagcacattcaggaggaacgttctgccgtctcagaatcccagcggggcacagcaggacagaaatgctttctcttttttaaaggacttaccattccgtattctgagcctcagtggcttatctcatgtcgtgagtcccattaagccagccacttggaccagctcaataaaatgctccaatgg

SEQ ID NO: 975 - DNA, 536 bp, Homo sapiens
  misc_feature (1)...(536): n = A,T,C or G
gcctacagtcagctccaagcaacggcacagacacctcctcctccggatgaccaggattgcctctgggtttgtcacaagctggaacagggtcctttggaggatggggctctgtgaagaaaaagaggtgaagtgtttggattcagtctgagccaaaggccactttatctgggtttaaggacacaagactccgtgaaagacaagctagttcttcttcctgccccgggagtccactgcaggccgatgcagacgcaaccacttcctcagccgctgtggctgagagcccgccactgcactctatgggcttggtgctgggtatggagaggagggtatgacatagcccctgccctcagagttttttcctactcattatccctgctgtctctggggacttcttaaatgtcagcaatcattgtcatcttcactgttgctccgcagcaccgcacatggctgcacctgggccatctnctctgatgtaaaggctgtgcagccaaaatttgcaattcttcccccagcttttaaaattgtgtaaaatatat

SEQ ID NO: 976 - DNA, 142 bp, Homo sapiens
catcatgttgccttttaatatggagcatgtgccatagctctccaggagaacccctctgtgtcacagcgaacctcggtcactgacactcaaaagaaggaattatttcaactcaataataaacaaataaccctattttaaaacc

SEQ ID NO: 977 - DNA, 345 bp, Homo sapiens
  misc_feature (1)...(345): n = A,T,C or G
ctctaccatgtgaagattgtgcctgcttcctctttgccttccaccatcattgtaagtttcccgaggcctccccagctatgcctcctgcacagcctgcagaactattacagggagcaacttgaatttaatncttctgattccaagtgtggtgttctgcctgtgcatacggaagaaggacgacacccaggaatgtgcccactgcagatgggagctggaagaaactgccgttatgtggagctcaatgtctccttttggttattttgatgcatgtttggggagggacttttgctgtcccagtgcattgtcttgaantttaaaggttatccttaaaactcatgcttcctt

SEQ ID NO: 978 - DNA, 204 bp, Homo sapiens
aaacgaaaatggacggccatatgtcacaagagaatgaaatctttgctcccaatccctgtcttcagagctgacctagaagccagccactccactcagacccaattcggatcactatgttcgtgaggactttaacagcatcaggagctccctctgactgctatatgaagagaactgcactcctgcccgagcaacagagcaagactg

SEQ ID NO: 979 - DNA, 309 bp, Homo sapiens
gcctctctgttccttgagacacagcaatattgaaattgggccaatgaataaccctacagtagcctatcattcactttggggaacggaagctgttgtgagcaaccctatgtgagcctcctgtcctcagctacatcgatgagcttggcagtgaattatctagtcccatccaagcttccagaagactgcagccccagctgacagcttgactgcaacctcatgaatgtttctgagctaggaccacccagttgcttctgaattcctcaccctcagaaactatgatacaataagtgctgattattttaaattgct

SEQ ID NO: 980 - DNA, 589 bp, Homo sapiens
  misc_feature (1)...(589): n = A,T,C or G
gtggggtctttcacaccgtaaggcactcggntcctcggacccaccccgtgtggaagagcatagctgggaccacacaccaaccttccaaggacccactgggagccctactcacacggactgtggccagagccctggccaaggggttctcagtggggaatatgctcacttcatcttggaagattcagccaactctccaccagaaagtcatcatcaacagcccctaccctcgaccatggatgagagcaaatgctccctgggcgccagccagatctggatcctttgaccattccgacagcagtgatcgaggaacagaaatgcccagtgtctccctgactggctggggcatcatccagaccaggcctcctggctgcagcccctctcccaggctgtcctctgcacaagggtctgtagcaagttgcaggcggaggcaggacagccatcctcaagctgcgactcgcgctacgaacactctntacacccaggccttgcggtgtccatggtctcctgggcagatcttggccaagggtgtgctttaggtggcctcatctgcgtccggncgangcctgcccgccggccgtttggtttcttg

SEQ ID NO: 981 - DNA, 259 bp, Homo sapiens
cacacaacctctgacaaggaagaaaggccacaaggggatgttgatcaaatccaggtcagaactccatcaaggtggacagacactcaacgccctggtagataacaaagacaacggtggacgagcaataaagaaatctaacaaggtctcaaaggaacagcaaatgaatttcaattttaaaaggacatgggtcattctagaaatcaatgtgtgtgcaatccaacagttccatatataaataccagaaaatatttatgaagcg

SEQ ID NO: 982 - DNA, 191 bp, Homo sapiens
gtgagcacaccagatgctggagcactcctgggaagagaaacagaaagaggaggaggaagggtgccaaaaacaatgtcttatttggccatttttcccttgaccctaatgctagaaaggaaggagagagggaagcttaaataatttataaaatcctggtgaattgtcaattaagtaaatcctttttaaaattt

SEQ ID NO: 983 - DNA, 620 bp, Homo sapiens
  misc_feature (1)...(620): n = A,T,C or G
gcctcataacctcagttgttactgatgcttgttttggttgtcaaagaagaatgaggagaggagatataggaggtggacttggaggtttgttcggagtcactggctgcagcaagtctcctcccacacagccgaccccattcctcagacctgcactctgtacagcatggctactgaccaactcatggttaaatgcgtaggagaaactgaagcacagctgaggtgcccaccatcagtagagctaggccagcatcagaggaagctgggcctccaagcccttctcggactcagaatcctcccagcagatacccaggcagaggagtgtgaactctcagcccctaaaaagggtttttctctattttccatgagttaggatccatgattacagtccagtccctaagctataatctctcagaaagaggagcgacaagaagcggatgtgagaaagtaaagagattttcaggcattaaaagcatggaaagaacaaggcaggggagatgcctacccccctgcctggaggactcttggcgctgtgctgggtncacttctgggaaaaaagngctgaatgnccactccatgcccttctgggtcaaaanccccccctttgttgaataaagattgtt

SEQ ID NO: 984 - DNA, 495 bp, Homo sapiens
gcagactgggtacagtggaaaactacaggatgcttgttccacatcactaccaaccatgtcaactgcacagacacaaaaggcaaacaggtgaatacagatcaacaagttggtcagttctttgctaatagagctgagccactgtcacttgtcatggatgctgaggccctgaacaacctagaggatctaaaggcaacactgagatcactgacccgagtcctttcccagcgatcctaaaatagatatcacattgcccagatggcaacattttctcagaggacccaaaatttagccccttactgatcttgaggttcctgacccttcatccaacagccctgccttcttcttctccacagcaatgaagagtgaaaggggcggggtcaccctaatgaactgaatcacaggagttaactgctaactccacctgggcacaatgggtcagaccaaagtctaaagctcaaaacagtaaagcagacatttacattggttcacacaggt

SEQ ID NO: 985 - DNA, 410 bp, Homo sapiens
ccagccttctggaaaattgatgtcattgctcatagaatgaatgatctcacaagataaaagtgtggatgactcagagcagctcatccatccaactagagactagagactgtcaacagctcagtaactttgtctgaatatgaaggacccgaaggaccactgagattggagacagaacaaaggccacaggattctgctgcaaattctaacaggaggaggcaatggcagcccttactaaaaccgcagaactacaggaagaggatccctgagtgggattcctgtgtgaaaggcattttcacctttttgtgtatcttcagaatcttaactttcatgagagaagaatagaaatgcaacaatggaacaatccactgtatacacgtagctgacaatttaataaacttgaaggaaatgct

SEQ ID NO: 986 - DNA, 316 bp, Homo sapiens
gcatgaagctgcctgacatctaaggatctctgaagagaactgggacctgaaacccatctgaaatgtatctgcagacaggtcaagttcatcgagagtcacctcctgcctgacactccagtcattaattccagccataactacagcttttattggacaagagactgatttcagcactttctacagataagaagaccatcaaccatggattggttctggccggtttccagaagatacactgttacatgccttcatgccctgaaaaggcattttgatgtttagggcctagttgtgatacatttaaatgtctcatttctcc

SEQ ID NO: 987 - DNA, 295 bp, Homo sapiens
ggcaagccagtcatcggaagaacaacacagccaccctaaagagaaagatgagctgcgaggcactgatggcatgcccactgatgtgtatcaagtgcacgtcccgctgcggaaagagacacgtgttcctccaaaaggcactctgctttttaactctcaggtctcagacaacaaaccaaagacactcctgagacttcagcaggagtgccccagacagtgcatgagcatgtacgatccattccttattttctctatgtcatttccctgcagagtcaaaacaatgcattcatttaaagtc

SEQ ID NO: 988 - DNA, 426 bp, Homo sapiens
  misc_feature (1)...(426): n = A,T,C or G
ttgaatacaaggatgtggtcaactatactgttcttaccgttgaaaaagaagtgctgaggccaggcatggtggctcacacctgtaatcccagcactttgggatgccgaggcagctggatcacttgtggtcaagagttcaagaccagattgggcgacatgatgaaaccccgtctctactacaaatacgaaaattagccattgtggtggcacacgcctgtaatcccagctactcaggaggccgatgtgggagaactgaaccctggaggtggagattgcagtgagccaagatggcgctactgtgctccagcctgggcaacaaagcaacactatgttttaaataaataaataagtgctgagatctcagaaaatacaaaaaaaaaaaggccagcgaggccaattcagnttggacttanccaggctgaacttg

SEQ ID NO: 989 - DNA, 327 bp, Homo sapiens
gtctcgtaagcagagacactgactaccttgtacgtggagtacctctatttagagtaaaggatagttttccttacagccttggaagactgagagagcatctcctccctagaaaaggacatccatgcttactgccctttataaaagattcaagctttctaagttcagggtgttgctccctgtaatgaaacccactgtgtttccaagtatcacctggccctccctcttgatatccctctttgggaactggggctctaggaactgggaaaggcaatgccaatactctggctattgctattactctgagtaataaaagttcctcatctctac

SEQ ID NO: 990 - DNA, 475 bp, Homo sapiens
  misc_feature (1)...(475): n = A,T,C or G
gatgagacccaaccagaatgtcagaagagctgctccccaaatgtatatgaagaagtaaagtctaatagtggaacaagggttgtctgtggtgaacacaataatgtgccatccagattgcccttcaagaagggacttgctctaactgctaatagtgctgtcaacaaaaagccttcatgggcagattttcagggacctcatcagatgcaaagagacacttcacccaatgtcatgtctttcccaatgtgatccatacccaatgactgattaagatgggagtataagggccagaccactttggtccaaagcaggacaactctgacaggtcattttagtttcagacctccccacagaagccatcaacactgccactggacgaaaactgtaactctacttctccacatgctcaatcttgnatccttgctctgccctcataaatgttcatccaagggtacttcctaataaatattctgcatac

SEQ ID NO: 991 - DNA, 307 bp, Homo sapiens
aaaatacataccatcagaacaaggcaaaatggaggttatctacattgtatccctctgtcttttaaattctaaagagtccatgttgtgagcatctcaaggaagtgaggcctcctgccaatggccatgtgaatgagcttggaagtggatcttccagcctcagtcaagccttcagataactgcagccccatctgacagtgtgactgcaaccctatgaaagaacctgggccagaaccacccagctaagctgctgctggactcctgactctcagaaactgtgtgaaataataaatgctttttgttttaacct

SEQ ID NO: 992 - DNA, 305 bp, Homo sapiens
atgtggctaccacaaagggacctgaaggagactgctgaagaccctgagaccctaagctctgctaacccctttttggatgagaatctgtcttctcatggagcctaaagagttgtgaagatgggtatggtggctcacagctgtgatcccaacacttcggaaggctgaggcagacccctgaattccagcaaccagtttgaagtcccccacagaggaacgggatctgcaagagaatacagcttcttcatctccctgtcccatgacttcatcctgtactctttaacaaataaacaattgccacacttcgg

SEQ ID NO: 993 - DNA, 326 bp, Homo sapiens
ggaggaggcagcctcgtttttgcagcccgagtcgtgggagctgcccgtgtccatggtcatgagaatatgaacttcgagaacatctgacctgctgccacctggccagtgtcctgcctttgaggagtccaggatttacaagcctgctgttctcaaccttgtttggcactaacacaccggagaccatcagtaacggtgggtctgcaaggcacagatcttcaccagggatccttggggagaaaccaagcaaactatttcctgacactagacaggcgtatccctccctttgagaaaattcactttctaaaaccataaacaacagctggttg

SEQ ID NO: 994 - DNA, 286 bp, Homo sapiens
attttcaaactagaagtggaaaagctactgaagcatcttacaaggacataaagtcaaatttgacctccccactgccttagctttggcaaatgaaagaaaagcagaagtgatatgtgtcatattggatggaaagaattcccctgcccttctcctgtttcagtgattgcagaagcactcaagctgaagcctccctcccctgtgtctatgagtcactctcatgagccatacttgccaccctgcaccagacatctggcataagtgaggaataaacctctgtgtggaatgc

SEQ ID NO: 995 - DNA, 223 bp, Homo sapiens
ctggcaaaaagagccaatgtgggtaaacgccattccagcagcacagccgaggaggagactccacgtgggaataaatcaagttgaggcagaaactaaataagaccccaattctaatttattaattcaatcttttgctctcattttatctaacacatgaatcagttcaatttccaagccatgtgtgctttcgatgtcaaatatataataaactaagttttcactg

SEQ ID NO: 996 - DNA, 575 bp, Homo sapiens
  misc_feature (1)...(575): n = A,T,C or G
taaatcttgctactgctcactctttcggtccacgctgcttttatgagctgtaacactcacagcgaaaatctgccgcttcacttctgagcccagcgagaccacgagcccaccaggaggaacgaacaactccagacgtgctgccttaagagctgtaacactcaccgcgaaggtctgcagcttcactcctgagccagagagaccacgaacccaccagaaggaagaaactctgaacaccagaagggacagactccagacacgccaccttaagagctgtaacactcaccgcgagggtccncggcttcattcttgaagtcagtgagaccaagaacccaccaattccgggcacactttctctttctttcttttgcctattaaacctgtgctcctaaactcctcatctgtgttcatgttctaaattttcttggcacgagatgacgaactggggtatttatccagacaatgcgggcgcttcaacatgtgcactggtctgntatggaaaatggtgnaatcctgctaaaacttctctgtctctgctacacaagtgaaacctgacnttttcattttggaaacataca

SEQ ID NO: 997 - DNA, 527 bp, Homo sapiens
  misc_feature (1)...(527): n = A,T,C or G
gcaagaaatgaacgtgatattttctccgcctcctntcttctgactgagaagatgattcctggagataatccacttggttatccgcggatgtgaacataatttggaggcagcagtcactccagatggcccgctgaagctgggagtcctgagttaatttcaagccaaatttctcactccctggaggagcagagtggagggtgtgtgtgcatggagaagtccaagatttcatatctggaaaagaagactgggagaggccagcatgaatggccactgtcctcgccaaatctggatggtatgtcttaagtgatacttgcaccagtgaagctgaagatcacaattactgcctcaaatactcactgcctggaaaccggccacctctgctccaaaacaagggcttgctatgtgctgaccttgtgtccaagctccacccctgctgcttgttccaacngtcttgctctctgtcttcctccaatccgactgcagtggggttggcaagtgtangtgtggggggtgggaagtggagatgt

SEQ ID NO: 998 - DNA, 373 bp, Homo sapiens
gctggagtgatcatggctcactgcagctccaactcttgggcccaagggatcctcccgcctcagcctctgagtacctggggctacagatgcatggccaccacacccagggaaagtgcttacctcaactgccaatttacggaggatctctgtggatggtaaatcagagaagagtgtgaaaggattatgagcaggagaatgacatatttggactatgtcccagagagacaacactgatgataatgaatataatcggctgaaagagaacaccagaacactgtttagaaggcaactataacatctcaaattagtgacgactgtcatctgaaccatggagaagattttctaaaataaaactagtaggaatttgtgactt

SEQ ID NO: 999 - DNA, 332 bp, Homo sapiens
atggaaaaacaagacaccaagaggctaagtggttttaccaaggatacgtggcttgttaagtgccaagctctccatggcatattatgctgccttccaagtgccttaggctgtgtgttgactggggcatcctctctgcaatcatggctgtgagtgataggtggacttgccaactccctgattacctgccatccatggaaagtcaacacctaaatatgttgtcttatactactagataatatatgactattatactgcaaataatctttttgaagcaaattataggaataaattgagactaagaacaataataaacttgggaaatttacaaaggc

SEQ ID NO: 1000 - DNA, 556 bp, Homo sapiens
  misc_feature (1)...(556): n = A,T,C or G
caacgtgatggctgcagtccagcatccattgtggaccatgaggcaatcttgagaatggaaaccatacaatacaatagtcaaagaggaaaggttggatcgatcagtgaagtttcacagaagttgtgacatttgggttggatcttgaaagataatgggagctttgaaggtgaatgaaaaaagaagtggaagaacattcctggtagatggaacagcatatgccaaagcacagaggtccacattgcctttatgagctgtaatactcactgcgaaggtctgcagcttcactcctgaagccagcgagaccacgaacccaccgggagaaatgaacaactcccacgcgcggncttaagaactgtaacactcacggnaaaggtcgcacttcacttctgagctacgagacnccaacccncnaaaaggaaaaacttccgacccttccgacattcanaaggaccaactccaacccccnccttaaaagttgaccttncccggaagggtccggggnttttttnttgaatccgnggaaccaaaanccnccattccggcccagttttacccc

SEQ ID NO: 1001 - DNA, 232 bp, Homo sapiens
ccctggcactgaccccagctcggcaacccagatgagagctaattttggggaaatgacttcgcctcttggagtctcagtgagaaaacaccaagaacccctcaaggagcagctgcaggtgaagcgacgacatgcacagcatgcatcagaccgcgctggacagaggcgcttgttcctgtttctacctctccccacttcagaggattccttcaataaaaatcaatttccaaacaag

SEQ ID NO: 1002 - DNA, 467 bp, Homo sapiens
  misc_feature (1)...(467): n = A,T,C or G
ggagctcctgcttnagtncnaactgaggacttttacanaggaagggaaactcaactagaccacctcagatgtcataaagaacactgacttggcaccagaagatctgtactcacgtcctaattcttcaatttaacaagctttgtggccttggagaaactggctgacatttttgagcttcagttttcacctttgtaaaatgatgcagttggactttcctactggtcctcaaacctttgtgtcatgcattctatcaacgtttgaactctgtccttaccagccagtttcatccccactctgattnctcctccctccaaccaaagaataaaagcagcaagcaagaaatctccttttccaagcatgacacttacatgtttataggctgnctatggcccttttcataatttgngcttttcaattttttttctgggatttaagttttaaaagaataaattttatcatgaatctat

SEQ ID NO: 1003 - DNA, 124 bp, Homo sapiens
  misc_feature (1)...(124): n = A,T,C or G
aaangcatggctntgcctcctcatttgaagcccactcangattgataataaagaaagtaactttgaagtaaacagggccagtcttatgagtcttggagtaataaaatgattctgtgctttgctc

SEQ ID NO: 1004 - DNA, 530 bp, Homo sapiens
  misc_feature (1)...(530): n = A,T,C or G
actggacaagccggcaccaccccatgattcaaggatggccatagcccagtgcaggagcagatttgcttccagtttgcccttcctcctagctgaactccaggctccagcccagagaagcaagaaaagagcaaacagaagttattcacatgtgcatcagacacgcaatccataccacagccaccagggtgattgtccaggttgtatttctgctgacatcgacccttcatgccttcctcttgttgacccttccagctacacctagctcggtcctcttcagagccacgccaacacccaggttcctctgcagtgcatccccatggggatttacccggcccccacatgccagaccatcgttggtggacctcatcaccagcatgaagtgggctcttggagttgtcgactgactagttcacaattagtgactcatagcatctcactnatttcttttcatcaagtaggaggnagcaagtctgcacttttgcatcacattttaaaaanatctgggnggttgtttttttgcccaaaactaa

SEQ ID NO: 1005 - DNA, 336 bp, Homo sapiens
gggggagacagagtctcactatgtcactgaagctggagtgcaatggcatgatctcagctcactgcaacctctgcctcccaggttcaagtgactctcttgcctcagcctcctgagatgtgctccaccatgcctggggaatttttctatttttagtagagacagggtttcaccatgttggccaggctggtctcgaactcctgacctcgtgatccacccaccatggcattccaaagtgctgggattataggcgcgagctgctgcacctggccccggttcactcttgtgacaaatttcttcatttgacaaaataaaagaaagaatttcagtacaaaaatc

SEQ ID NO: 1006 - DNA, 534 bp, Homo sapiens
  misc_feature (1)...(534): n = A,T,C or G
acagattcttgctctgtccgaccaggctggagtgcagtggcccgatctcagctcactgcaacgtccacctcccgagttcaagcaattcttcggcctcagcctcctgagtagctgggattacagatgtcccccaccacgtccggctaatttttgtatttttagtagagacggggttacaccatgttagccaggctggtcatgaactcctgacctcatgatctgcccactttgacctcccaaagtgctgagattacaggcgtgagccaccacgcccagctgaaactgttctttaaactgggtagcctataccaatgtaaggcaatgttgaggagtagatgcggcctctttcctcaaagagagatccagaaaaggcttctgaaaacccaagacacttgaagatcattgtcctctancaagtctgaacaccatggagaggccacagctgtgaaaaaaagaaaangatgggccccggttttaccaanggccccnttcctggaatgaaaagggaaaaaaccnncctttaaaaaaagagcc

SEQ ID NO: 1007 - DNA, 276 bp, Homo sapiens
atgctcacccttggaatcaagctgccatactgtgaggaagctcaggctacatggagctgtcacatgggtctggccaagacagtccagccaacctctcagccaacagctagcatcaaagcccagaatgatgagggagcaagcctttggatgattccagcaaccagcttttgagctgcccccactgagattccatggtggcacctggtggcacagagacaagctgccccaccacgccctttctgaattcctgacctgaagaataaatgatgttaagcc

SEQ ID NO: 1008 - DNA, 327 bp, Homo sapiens
  misc_feature (1)...(327): n = A,T,C or G
cncctaaancagggactggggcttgncagntttggaanaattgcgtnggntaattgcttgaagnncgggaaaaaaaaaagccacctggccccagggtcaaaacctttgattgaananagcnccncctaaaaaactgttttgcagaatcaaatgccacaganaagcanggtaaaatcaggggtggaaaaaagaaccgcctggggtccctggtcactttttgtcctcatgtttcccttggcattaataagaaatttaccanaatgcnttttcgatnggataccaaagaagacattctggggttaataaaataacctttttgtaattatg
